(19) United States
(12) Patent Application Publication
(10) Pub. No.: US 2002/0095031 A1
(43) Pub. Date: Jul. 18, 2002

(54) Novel human polynucleotides and polypeptides encoded thereby

(76) Inventors: Michael C. Nehls, Stockdorf (DE); Brian Zambrowicz, The Woodlands, TX (US); Arthur T. Sands, The Woodlands, TX (US)

Correspondence Address: Lance K Ishimoto, Lexicon Genetics Incorporated, 4000 Research Forest Drive, The Woodlands, TX, 77381, US

(21) Appl. No.: 09/563,817

(22) Filed: May 3, 2000

Related U.S. Application Data
(60) Provisional application No. 60/132,343, filed on May 4, 1999.

(51) Int. Cl. C07H 21/00; C12P 19/34; C12N 15/00; G06F 19/00; C12N 15/09

(52) U.S. Cl. 536/23.1; 435/91.2; 435/320.1; 435/440; 702/20

(57) ABSTRACT

Novel human polynucleotides are disclosed that correspond to human gene trapped sequences, or GTSs. The disclosed GTSs are useful for gene discovery and as markers for, inter alia, gene expression analysis, identifying and mapping the coding regions of the mammalian, and particularly human, genome, forensic analysis, and determining the genetic basis of human disease.

[0001] The present application claims priority to U.S. Application Ser. No. 60/132,343, filed May 4, 1999 which is herein incorporated by reference in its entirety.

### 1. FIELD OF THE INVENTION

[0002] The present invention is in the field of molecular genetics. The application discloses novel nucleic acid sequences that partially define the scope of human exons that can be trapped and identified by the disclosed vectors/methods, and which are useful, inter alia, for identifying the organization of the coding regions of the human genome.

### 2. BACKGROUND OF THE INVENTION

[0003] The Human Genome Project and privately financed ventures are currently sequencing the human genome, and the substantial completion of this milestone is expected before the year 2003. The hope is that at the conclusion of the sequencing phase, a comprehensive representation of the human genome will be available for biomedical analysis. However, the data resulting from such efforts will largely comprise human genomic sequence of which only a fraction encodes expressed sequence information. Although sophisticated computer-assisted exon identification programs can be applied to such genomic sequence data, the computer predictions require verification by laboratory analysis to actually identify the coding regions of the genome, and to identify exon splice junctions. Consequently, the availability of cDNA information will significantly contribute to the value of the human genomic sequence since cDNA sequence provides a direct indication of the presence of transcribed sequences as well as the location of splice junctions. Thus, the sequencing of cDNA libraries to obtain expressed sequence tags (or ESTs) that identify exons expressed within a given tissue, cell, or cell line is currently in progress. As a consequence of these efforts, a large number of EST sequences are presently compiled in public and privately held databases. However, the present EST paradigm is inherently limited by the levels and extent of mRNA production within a given cell. A related problem is the lack of cDNA sources from specific tissue and developmental expression profiles. In addition, some genes are typically only active under certain physiological conditions or are generally expressed at levels below or near the threshold necessary for cDNA cloning and detection and are therefore not effectively represented in current cDNA libraries.

[0004] Researchers have partially addressed these issues by using phage vectors to clone genomic sequences such that internal exons are trapped (Nehls, et al., 1994, Current Biology, 4(1):983-989, and Nehls, et al., 1994, Oncogene, 9:2169-2175). However, such libraries require the random cloning of genomic DNA into a suitable cloning vector in vitro, followed by reintroduction of the cloned DNA in vivo in order to express and splice the cloned genes prior to producing the cDNA library. Additionally, such methods can only “trap” the internal exons of genes. Consequently, genes containing a single exon or a single intron are typically not trapped by traditional methods of exon trapping.

### 3. SUMMARY OF THE INVENTION

[0005] The subject invention provides numerous isolated and purified novel human cDNAs produced using gene trap technology. The novel human gene trapped sequences (GTSs) of the subject invention are disclosed as SEQ ID NOS:9-1,008 in the appended Sequence Listing.

[0006] The subject invention further contemplates the use of one or more of the subject GTSs, or portions thereof, to isolate cDNAs, genomic clones, or full-length genes/polynucleotides, or homologs, heterologs, paralogs, or orthologs thereof, that are capable of hybridizing to one or more of the disclosed GTSs or their complementary sequences under stringent conditions.

[0007] The subject invention additionally contemplates methods of analyzing biopolymer (e.g., oligonucleotides, polynucleotides, oligopeptides, peptides, polypeptides, proteins, etc.) sequence information comprising the steps of loading a first biopolymer sequence into or onto an electronic data storage medium (e.g., digital or analogue versions of electronic, magnetic, or optical memory, and the like) and comparing said first sequence to at least a portion of one of the polynucleotide sequences, or amino acid sequence encoded thereby, that is first disclosed in, or otherwise unique to, SEQ ID NOS:9-1,008. Typically, the polynucleotide sequences, or amino acid sequences encoded thereby, will also be present on, or loaded into or onto a form of electronic data storage medium, or transferred therefrom, concurrent with or prior to comparison with the first polynucleotide.

[0008] Another embodiment of the invention is the use of a oligonucleotide or polynucleotide sequence first disclosed in at least a portion of at least one of the GTS sequences of SEQ ID NOS:9-1,008 as a hybridization probe or for chromosome mapping. Of particular interest is the use of such sequences in conjunction with a solid support matrix/substrate (resins, beads, membranes, plastics, polymers, metal or metallized substrates, crystalline or polycrystalline substrates, etc.). Of particular note are spatially addressable arrays (i.e., gene chips, microtiter plates, etc.) of polynucleotides wherein at least one of the polynucleotides on the spatially addressable array comprises an oligonucleotide or polynucleotide sequence first disclosed in at least one of the GTS sequences of SEQ ID NOS:9-1,008.

[0009] Similarly, one or more oligonucleotide probes based on, or otherwise incorporating, sequences first disclosed in any one of SEQ ID NOS:9-1,008, can be used in methods of obtaining novel gene sequence via the polymerase chain reaction or by cycle sequencing. Similar oligonucleotide hybridization probes can also comprise sequence that is complementary to a portion of a sequence that is first disclosed in, or preferably unique to, at least one of the GTS polynucleotides the sequence listing. The oligonucleotide probes will generally comprise between about 8 nucleotides and about 80 nucleotides, preferably between about 15 and about 40 nucleotides, and more preferably between about 20 and about 35 nucleotides.

[0010] Moreover, an oligonucleotide or polynucleotide sequence first disclosed in at least one of the GTS sequences of SEQ ID NOS:9-1,008 can be incorporated into a phage display system that can be used to screen for proteins, or other ligands, that are capable of binding an amino acid sequence encoded by an oligonucleotide or polynucleotide sequence first disclosed in at least one of the GTS sequences of SEQ ID NOS:9-1,008.

[0011] An additional embodiment of the present invention is a library comprising individually isolated linear DNA molecules corresponding to at least a portion of the described human GTSs which are useful for synthesizing physically contiguous sequences of overlapping GTSs by, for example, the polymerase chain reaction (PCR).

[0012] The subject invention also provides for an antisense molecule which comprises at least a portion of sequence that is first disclosed in, or preferably unique to, at least one of the GTS polynucleotides.

[0013] The subject invention also contemplates a purified polypeptide in which at least a portion of the polypeptide is encoded by, and thus first disclosed by, at least a portion of a GTS of the present invention. The invention also relates to naturally occurring polynucleotides comprising the disclosed GTSs that are expressed by promoter elements other than the promoter elements that normally express the GTSs in human cells (i.e., gene activated GTSs). Such promoter elements can be directly incorporated into the cellular genome or recombinantly engineered upstream from at least a portion of a GTS (preferably at least about 50, more preferably at least about 75, and most preferably at least about 100 to 130 base in length) of the present invention, or a complement thereof. A particularly preferred embodiment includes recombinantly engineered expression vectors that similarly have or incorporate at least a, preferably unique, portion of the disclosed GTSs or complement thereof.

### 4. DESCRIPTION OF THE SEQUENCE LISTING AND FIGURES

[0014] The Sequence Listing is a compilation of nucleotide sequences obtained by sequencing a human gene trap library that at least partially identifies the genes in the target cell genome that can be trapped by the described gene trap vectors (i.e., the repertoire of genes that are active, or have not been inactivated).

[0015] FIGS. 1A-1D.

[0016] FIG. 1A illustrates a retroviral vector that can be used to practice the described invention.

[0017] FIG. 1B shows a schematic of how a typical cellular genomic locus is effected by the integration of the retroviral construct into intronic sequences of the cellular gene.

[0018] FIG. 1C shows the chimeric transcripts produced by the gene trap event as well as the locations of the binding sites for PCR primers.

[0019] FIG. 1D shows how the PCR amplified cDNAs are directionally cloned into a suitable GTS vector.

[0020] FIG. 2 shows a block diagram that is exemplary of a computer system (102) that can be used to implement the computer-based systems of the present invention.

### 5. DETAILED DESCRIPTION OF THE INVENTION

[0021] The present invention is directed to novel human polynucleotide sequences obtained from cDNA libraries generated by the normalized expression of genomic exons using gene trap technology. In particular, the disclosed novel polynucleotides were generated using a modified reverse-orientation retroviral gene trap vector that was nonspecifically integrated into the target cell genome, although other polynucleotide (DNA or RNA) gene trap vectors could have been introduced to the target cells by, for example, transfection, electroporation, or retrotransposition. Preferred retroviral vectors that can be used to practice the present invention (as well as methods and recombinant tools for making and using the described GTSs) are disclosed in, inter alia, U.S. application Ser. No. 09/276,533, filed Mar. 25, 1999 which is herein incorporated by reference in its entirety.

[0022] After integration, the exogenous promoter of the sequence acquisition, or 3′ gene trap, component of the vector was used to express and splice a chimeric mRNA that was subsequently reverse transcribed, amplified, and subject to DNA sequence analysis. Unlike conventional cDNA libraries, the presently disclosed libraries are largely unaffected by the bias inherent in cDNA libraries that rely solely on endogenous mRNA expression. Additionally, by integrating a vector into the target cell genes, a chimeric mRNA is produced that allows for the specific expansion and isolation of cDNAs corresponding to the chimeric mRNAs using vector specific primers.

[0023] As used herein the term “gene trapped sequence”, or “GTS”, refers to nucleotide sequences that correspond to naturally occurring endogenously encoded human exons that have been expressed as part of a chimeric “gene trapped” mRNA. Typically, the chimeric mRNA incorporates at least a portion of sequence that has been engineered into the sequence acquisition exon of a gene trap vector which, inter alia, facilitates cDNA production by reverse transcriptase and amplification of the cDNA by PCR to produce an isolated linear DNA molecule. The disclosed GTSs do not include vector encoded sequences.

[0024] The term “GTS” not only refers to polynucleotides that are exactly complementary to naturally occurring human mRNA, but also refers to “GTS derivatives”. The term GTS derivative also refers to heterologs, paralogs, orthologs, and allelic variants of the specific GTSs described herein. In addition, a GTS may include the complete coding region for a naturally occurring peptide or polypeptide. A GTS may also include a complete open reading frame.

[0025] The term “GTS peptide” as used herein includes oligopeptides or polypeptides sharing biological activity and/or immunogenicity (or immunological cross-reactivity) with an amino acid sequence encoded by at least one of the disclosed GTSs or complement thereof. The terms “biological activity” (or “biological characteristics”) of a polypeptide refers to the structural or biochemical function of the polypeptide in the normal biological processes of the organism in which the polypeptide naturally occurs. Examples of such characteristics include protein structure and/or conformation, which can be determined biochemically by reaction with appropriate ligands or receptors or by suitable biological assays.

[0026] A GTS peptide may also correspond to a full-length naturally occurring peptide or polypeptide. GTS peptides can have amino acid sequences that directly correspond to naturally occurring polypeptides or amino acid sequences, or can comprise minor variations. Such variations can include amino acid substitutions that are the result of the replacement of one amino acid with another amino acid having a similar structural and/or chemical properties, such as the substitution of a leucine with an isoleucine or valine, an aspartate with a glutamate, or a threonine with a serine, i.e., conservative amino acid replacements. Additional variations include minor amino acid deletions and/or insertions, typically in the range of about 1 to 6 amino acids, and can also include one or more amino acid substitutions. Guidance in determining which GTS peptide amino acid residues can be replaced or deleted without abolishing the biological activity of interest may be determined empirically, or by using computer amino acid sequence databases to identify polypeptides that are homologous to a given GTS peptide and trying to avoid amino acid substitutions in conserved regions of homology.

[0027] “Homology” refers to the similarity or the degree of similarity between a reference, or known polynucleotide and/or polypeptide and a test nucleotide sequence and/or its corresponding amino acid sequence. As used herein, “homology” is defined by sequence similarity between a reference sequence and at least a portion of the newly sequenced nucleotide. Typically, a corresponding amino acid sequence similarity should exist between the peptides encoded by such homologous sequences.

[0028] To determine whether proteins are homologous, the GTS sequence is translated into the corresponding amino acid sequence. The amino acid sequence is then compared with reference polypeptide sequences. A short string of matching amino acid sequence can constitute good evidence of homology (for example, repeating Gly-Pro-X sequence, or the presence of an RGD motif). However, typically a larger number of similar amino acids is required to label two sequences homologous. Generally, the match needs to be at least about 7 or 8 amino acids, among which perhaps one mismatch is allowed. These criteria allow good sensitivity in finding all relevant sequences while providing a threshold amount of selectivity.

[0029] After peptide homology has been found, the respective nucleotide sequences are compared. An alignment of the reference and new sequences should show at least about 60%, and preferably at least about 65%, agreement over the minimum of 21 nucleotides which correspond to the 6 matching amino acids. Generally, a low percentage of agreement is acceptable if the differences are in the “wobble” position (or third nucleotide of the triplet coding for an amino acid).

[0030] As used herein, a “mutated” polypeptide has an altered primary structure typically resulting from corresponding mutations in the nucleotide sequence encoding the protein or polypeptide. As such, the term “mutated” polypeptides can include allelic variants. Mutational changes in the primary structure of a polypeptide result from deletions, additions or substitutions. A “deletion” is defined as a change in a polypeptide sequence in which one or more internal amino acid residues are absent. An “addition” is defined as a change in a polypeptide sequence which has resulted in one or more additional internal amino acid residues as compared to the wild type. A “substitution” results from the replacement of one or more amino acid residues by other residues. A polypeptide “fragment” is a polypeptide consisting of a primary amino acid sequence which is identical to a portion of the primary sequence of the polypeptide to which the polypeptide is related.

[0031] A host cell “expresses” a gene or DNA when the gene or DNA is transcribed into RNA that may optionally be translated to produce a polypeptide.

[0032] “Recombinant” means that the GTS is adjacent to “backbone” nucleic acids to which it is not adjacent in its natural environment. Additionally, to be “enriched” the GTS's will represent 5% or more of the number of nucleic acid inserts in a population of expression vectors, self-replicating nucleic acids, viruses, integrating nucleic acids, and other vectors or nucleic acids used to maintain or manipulate a GTS. Preferably, the enriched GTS represent 15% or more of the number of nucleic acid inserts in the population of recombinant backbone molecules. In a highly preferred embodiment, the enriched GTSs represent 90% or more of the number of nucleic acid inserts in the population of recombinant molecules. Additional definitions exemplary of the general level of skill in the art can be found in U.S. application Ser. Nos. 08/426,787 and 08/487,429 which are herein incorporated by reference in their entirety.

[0033] The subject invention also includes GTSs which are incorporated into expression vectors and transformed into host cells which subsequently express the polynucleotides and/or polypeptides encoded by the GTSs.

[0034] The subject invention also includes antibodies capable of specifically binding to GTS peptides, as well as methods of detecting an GTS peptides or the corresponding protein by combining a sample for analysis with an antibody capable of specifically binding to a GTS peptide and detecting the formation of antibody complexes present in the sample.

[0035] The subject invention also includes a method of isolating a GTS peptide, or its corresponding protein comprising the step of separating the GTS peptide, or its corresponding protein, from a solution utilizing an antibody capable of specifically binding to the GTS peptide or its corresponding protein.

[0036] The subject invention also provides for markers for use in detecting diseases, biological events, cell types and tissues which comprise at least a portion of a GTS sequence.

[0037] Further, the subject invention provides polynucleotide markers useful for physical and genetic mapping of the human, and/or certain model organism, genome(s). In particular, the nucleotide sequences in the Sequence Listing provide sequence tagged sites (STS), that will be useful in completing an STS-based physical map of the human genome, a goal of the human genome project (Collins, F. and Galas, D. (1993) Science 262:43-46). Additionally, some of these sequences will identify new genes. These new genes will be useful in completing physical and genetic maps of all the genes in the human genome, another goal of the human genome project.

[0038] The exons contained in the disclosed GTSs contain open reading frames (present in one of the three reading frames in either orientation of the sequence). Typically, the gene trap strategy employed to generate the GTS sequences allows for the directional cloning and identification of the sense strand. However, it is possible that occasional sequencing errors or random reverse transcription, or PCR aberrations will mask the presence of the appropriate open reading frame. In such cases of sequencing error, it is possible to determine the corresponding GTS sequence by expressing the GTS in an appropriate expression system and determining the amino acid sequence by standard peptide mapping and sequencing techniques (Current Protocols in Molecular Biology, John Wiley & Sons, Vol. 2, Sec 16, 1989). Additionally, the actual reading frame and amino acid sequence of a given nucleotide sequence may be determined by in vitro synthesis of a portion of an oligopeptide comprising a possible amino acid sequence and preparing antibodies to the oligopeptide. If the antibodies react with cells from which the GTS of interest was derived, the reading frame is likely correct. Alternatively, codon usage analysis can be used to track and correct reading frame shifts in gene sequence data.

[0039] The correct amino acid sequence of a GTS protein is largely a function of the DNA sequence and the correct amino acid sequence can be readily determined using routine techniques. For example, by providing independent three fold sequencing coverage of the GTS library, random sequencing/RT/PCR errors can be identified and corrected by selecting the sequence represented by the majority of gene trap sequences covering a given nucleotide.

[0040] The nucleotide sequences of the Sequence Listing may contain some sequencing errors and several of the nucleotide sequences of the Sequence Listing may contain nucleotides that have not been precisely identified, typically designated by an N, rather than A, T, C, or G. Since each of the nucleotide sequences presented in the Sequence Listing is believed to uniquely identify a novel GTS, any sequencing errors or N's in the nucleotide sequences of the Sequence Listing do not present a problem in practicing the subject invention. Several methods employing standard recombinant methodology, for example, as described in Molecular Cloning: Laboratory Manual 2nd ed., Sambrook et al. (1989), Cold Spring Harbor Laboratory, Cold Spring Harbor, N.Y. (or periodic updates thereof), may be used to correct errors and complete the missing sequence information. For example, a nucleotide and/or oligonucleotide corresponding to a portion of a nucleotide sequence of GTS of interest, can be chemically or biochemically synthesized in vitro, and used as a hybridization probe to screen a cDNA library in order to identify and obtain library isolates comprising recombinant DNA sequences containing the GTS cDNA sequence of interest. The library isolate may then be independently subjected to nucleotide sequencing using one or more standard sequencing procedures so as to obtain a complete and accurate nucleotide sequence.

[0041] For the purposes of this disclosure, the term “isolated and purified polynucleotide” comprises a polynucleotide purified from a natural cell or tissue as well as polynucleotides which are complementary to the polynucleotides isolated from the natural cell or tissue. One example of an isolated or purified polynucleotide, or a substantially isolated preparation thereof, is a preparation where the polynucleotide of interest represents at least about 80 percent, preferably at least about 85 percent, and more preferably at least about 90 to 95 percent or more of the net product(s) that can be visualized on a DNA agarose gel stained with ethidium bromide.

[0042] The described GTSs were obtained from isolates of a cDNA library. Clones isolated from cDNA libraries generated by 3′ gene trapping typically contain only a portion of the mature RNA transcript that has been spliced to a vector encoded sequence acquisition exon, and therefore such clones may only encode a portion of the polypeptide of interest (however, it should be appreciated that a number of the disclosed GTSs may encode full-length ORFS). To obtain the remainder of the sequence, the GTSs can be used as hybridization probes to re-screen the same or a different cDNA library, and additional clones isolated by the re-screening can be purified and characterized using standard methods (Benton and Davis, 1977, Science, 196:180-183). Once sufficiently purified, the size of the DNA insert can be approximated by agarose gel electrophoresis and the larger clones can be analyzed to determine the exact number of bases by DNA sequencing. Frequently, the use of a library different from the one which contained the original clone is useful for this purpose, and particularly a library that has been prepared with extra care to extend cDNA synthesis to full-length, or a library that has been intentionally primed with random primers in order to “jump over” particularly difficult regions of the transcript sequence.

[0043] Missing upstream DNA sequence can also be obtained by “primer extension” of the cDNA isolate, a practice common in the art (Sambrook et al. (1989), Molecular Cloning: Laboratory Manual 2nd ed. pg 7.79-7.83, Cold Spring Harbor Laboratory, Cold Spring Harbor, N.Y.), whereby a sequence-specific oligonucleotide is used to prime reverse-transcription near the 5′-end of the cDNA clone and the resulting product is either cloned into a bacterial vector or is analyzed directly by DNA sequencing. Finally, newer methods to extend clones in either direction employ oligonucleotide-directed thermocyclic DNA amplification of the missing sequences, wherein a combination of a cDNA-specific primer and a degenerate, vector-specific, or oligo-dT-binding second oligonucleotide can be used to prime strand synthesis. In any of the above methods or other methods of detecting additional cDNA sequence, two or more resulting clones containing the partial cDNA sequence can be recombined to form a single full-length cDNA by standard cloning methods. The resulting full-length cDNA may subsequently be transferred into any of a number of appropriate expression vectors.

[0044] In many instances, the sequencing of clones resulting from independent nonspecific gene trap events will result in a natural redundancy of sequencing more than one cDNA from a particular gene. As discussed above, this feature is a built in form of error detection and correction. These independent gene trap events can also be combined using the various overlapping regions of sequence into an entire contiguous sequence (“contig”) containing the complete nucleotide sequence of the full length cDNA. Similar methodology can be used to combine one or more GTSs with one or more publicly available, or proprietary, ESTs to synthesize, electronically or chemically, a contiguous sequence.

[0045] The ABI Assembler application, part of the INHERITS DNA analysis system (Applied Biosystems, Inc., Foster City, Calif.), creates and manages sequence assembly projects by assembling data from selected sequence fragments into a larger sequence. The Assembler combines two advanced computer technologies which maximize the ability to assemble sequenced DNA fragments into Assemblages, a special grouping of data where the relationships between sequences are shown by graphic overlap, alignment and statistical views. The process is based on the Meyers-Kececioglu model of fragment assembly (INHERITS™ Assembler User's Manual, Applied Biosystems, Inc., Foster City, Calif.), and uses graph theory as the foundation of a very rigorous multiple sequence alignment program for assembling DNA sequence fragments. Additional methods of analyzing and using partial length sequences, such as most GTSs, and obtaining full length versions thereof are discussed in U.S. Pat. Nos. 5,817,479 and 5,552,281 and U.S. patent application Ser. No. 08/904,468 which are herein incorporated by reference in their entirety.

[0046] It will be appreciated by those skilled in the art that as a result of the degeneracy of the genetic code (see, for example, Table 4-1 at page 109 of “Molecular Cell Biology”, 1986, J. Darnell et al. eds., Scientific American Books, New York, N.Y., herein incorporated by reference) a multitude of GTS nucleotide sequences, some bearing minimal nucleotide sequence homology to the nucleotide sequence of genes naturally encoding GTS peptides, can be produced. The invention has specifically contemplated each and every possible variation of nucleotide sequence that could be made by selecting combinations based on possible codon choices. These combinations are made in accordance with the standard triplet genetic code as applied to the nucleotide sequence of naturally occurring human GTS nucleotide sequences and all such variations are to be considered as being specifically disclosed. Once the triplet codons are “translated” (which can be done electronically) into their amino acid counterparts, the amino acid sequences encoded by the GTS ORFs effectively represent a generic representation of the various nucleotide sequences that can encode the amino acid sequence (i.e., each amino acid is generic for the various nucleotide codons that correspond to that amino acid).

[0047] The presently described novel human GTSs provide unique tools for diagnostic gene expression analysis, for cross species hybridization analysis, for genetic manipulations using a variety of techniques, like, for example, antisense inhibition, gene targeting, the identification or generation of full-length cDNA, mapping the human genome, gene therapy, gene delivery, etc. Furthermore, the expression-based detection and isolation of the described novel polynucleotides verifies that the genes encoding these sequences have not been inactivated by, for example, the covalent modification (methylation, acetylation, glycosylation, etc.) of the target cell genome, or inhibiting the function of transcriptional control elements. The fact that the genes have not been inactivated in the target cell genome can indicate an involvement in cellular metabolism, catabolism, homeostasis, or any of a wide variety of developmental and cell differentiation processes or the regulation of physiological or endocrine functions in the body, etc. (although treating the target cell with, for example, histone deacetylators can partially compensate for such inactivation and expand the target size of a given trapping construct). These data are especially useful when correlated with cDNA data from differentiated tissues and/or cells or cell lines in order to determine whether the absence of expression is regulated at the level of transcription or gene inactivation.

[0048] 5.1 Polynucleotides of the Present Invention

[0049] The nucleotide sequences of the various isolated human GTSs of the present invention appear in the Sequence Listing as SEQ ID NOS:9-1,008. Additional embodiments of the present invention are GTS variants, or homologs, paralogs, orthologs, etc., which include isolated polynucleotides, or complements thereof, that hybridize to one or more of the disclosed GTSs of SEQ ID NOS:9-1,008 under stringent, or preferably highly stringent, conditions. By way of example and not limitation, high stringency hybridization conditions can be defined as follows: Prehybridization of filters containing DNA to be screened is carried out for 8 h to overnight at 65° C. in a buffer containing 6× SSC, 50 mM Tris-HCl (pH 7.5), 1 mM EDTA, 0.02% PVP, 0.02% Ficoll, 0.02% BSA, and 500 μg/ml denatured salmon sperm DNA. Filters are hybridized for 48 h at 65° C. in prehybridization mixture containing 100 μg/ml denatured salmon sperm DNA and 5-20×10⁶ cpm of ³²P-labeled probe (alternatively, as in all hybridizations described herein, approximately 42, 44, 46, 48, 50, 52, 54, 56, 58, 62, 64, 66, 68, 70, or about 72 degrees or more can be used). The filters are then washed in approximately 1× wash mix (10× wash mix contains 3M NaCl, 0.6M Tris base, and 0.02M EDTA, alternatively, as with all washes described herein, 2×, 3×, 4×, 5×, 6× wash mix, or more, can be used) twice for 5 minutes each at room temperature, then in 1× wash mix containing 1% SDS at 60° C. (alternatively, as in all washes described herein, approximately 42, 44, 46, 48, 50, 52, 54, 56, 58, 62, 64, 66, 68, 70, or about 72 degrees or more can be used) for about 30 min, and finally in 0.3× wash mix (alternatively, as in all final washes described herein, approximately, 0.2×, 0.4×, 0.6×, 0.8×, 1×, or any concentration between about 2× and about 6× can be used in conjunction with a suitable wash temperature) containing 0.1% SDS at 60° C. (alternatively, approximately 42, 44, 46, 48, 50, 52, 54, 56, 58, 62, 64, 66, 68, 70, or about 72 degrees or more can be used) for about 30 min. The filters are then air dried and exposed to x-ray film for autoradiography. In an alternative protocol, washing of filters is done for 37° C. for 1 h in a solution containing 2× SSC, 0.01% PVP, 0.01% Ficoll, and 0.01% BSA. This is followed by a wash in 0.1× SSC at 50° C. for 45 min before autoradiography. Another example of hybridization under highly stringent conditions is hybridization to filter-bound DNA in 0.5 M NaHPO₄, 7% sodium dodecyl sulfate (SDS), 1 mM EDTA at 65° C., and washing in 0.1× SSC/0.1% SDS at 68° C. (Ausubel F. M. et al., eds., 1989, Current Protocols in Molecular Biology, Vol. I, Green Publishing Associates, Inc., and John Wiley & sons, Inc., New York, at p. 2.10.3).

[0050] Preferably, such GTS variants will encode at least a portion or domain of a, preferably naturally occurring, protein or polypeptide that encodes a functional equivalent to a protein or polypeptide, or portion or domain thereof, encoded by the disclosed GTSs. Additional examples of GTS variants include polynucleotides, or complements thereof, that are capable of binding to the disclosed GTSs under less stringent conditions, such as moderately stringent conditions, (e.g., washing in 0.2× SSC/0.1% SDS at 42° C. (Ausubel et al., 1989, supra). Moderately stringent conditions can be additionally defined, for example, as follows: Filters containing DNA are pretreated for 6 h at 55° C. in a solution containing 6× SSC, 5× Denhart's solution, 0.5% SDS and 100 μg/ml denatured salmon sperm DNA. Hybridizations are carried out in the same solution and 5-20×10⁶ cpm ³²P-labeled probe is used. Filters are incubated in hybridization mixture for 18-20 h at 55° C. (alternatively, as in all hybridizations described herein, approximately 42, 44, 46, 48, 50, 52, 54, 56, 58, 62, 64, 66, 68, 70, or about 72 degrees or more can be used in combination with a suitable concentration of salt). The filters are then washed in approximately 1× wash mix (10× wash mix contains 3M NaCl, 0.6M Tris base, and 0.02M EDTA, alternatively, as with all washes described herein, 2×, 3×, 4×, 5×, 6× wash mix, or more, can be used) twice for 5 minutes each at room temperature, then in 1× wash mix containing 1% SDS at 60° C. (alternatively, as in all washes described herein, approximately, 42, 44, 46, 48, 50, 52, 54, 56, 58, 62, 64, 66, 68, 70, or about 72 degrees or more can be used) for about 30 min, and finally in 0.3× wash mix (alternatively, as in all final washes described herein approximately 0.2×, 0.4×, 0.6×, 0.8×, 1×, or any concentration between about 2× and about 6× can be used in conjunction with a suitable wash temperature) containing 0.1% SDS at 60° C. (alternatively, approximately 42, 44, 45, 48, 50, 52, 54, 56, 58, 62, 64, 66, 68, 70, or about 72 degrees or more can be used) for about 30 min. The filters are then air dried and exposed to x-ray film for autoradiography.

[0051] In an alternative protocol, washing of filters is done twice for 30 minutes at 60° C. in a solution containing 1× SSC and 0.1% SDS. Filters are blotted dry and exposed for autoradiography.

[0052] Other conditions of moderate stringency which may be used are well-known in the art. For example, washing of filters can be done at 37° C. for 1 h in a solution containing 2× SSC, 0.1% SDS. Another example of hybridization under moderately stringent conditions is washing in 0.2× SSC/0.1% SDS at 42° C. (Ausubel et al., 1989, supra). Such less stringent conditions may also be, for example, low stringency hybridization conditions. By way of example and not limitation, procedures using such conditions of low stringency are as follows (see also Shilo and Weinberg, 1981, Proc. Natl. Acad. Sci. USA 78:6789-6792): Filters containing DNA are pretreated for 6 h at 40° C. in a solution containing 35% formamide, 5× SSC, 50 mM Tris-HCl (pH 7.5), 5 mM EDTA, 0.1% PVP, 0.1% Ficoll, 1% BSA, and 500 μg/ml denatured salmon sperm DNA. Hybridizations are carried out in the same solution with the following modifications: 0.02% PVP, 0.02% Ficoll, 0.2% BSA, 100 μg/ml salmon sperm DNA, 10% (wt/vol) dextran sulfate, and 5-20×10⁶ cpm ³²P-labeled probe is used. Filters are incubated in hybridization mixture for 18-20 h at 40° C. (alternatively, as in all hybridizations described herein, approximately 42, 44, 46, 48, 50, 52, 54, 56, 58, 62, 64, 66, 68, 70, or about 72 degrees or more can be used). The filters are then washed in approximately 1× wash mix (10× wash mix contains 3M NaCl, 0.6M Tris base, and 0.02M EDTA, alternatively, as with all washes described herein, 2×, 3×, 4×, 5×, 6× wash mix, or more, can be used) twice for five minutes each at room temperature, then in 1× wash mix containing 1% SDS at 60° C. (alternatively, as in all washes described herein, approximately 42, 44, 46, 48, 50, 52, 54, 56, 58, 62, 64, 66, 68, 70, or about 72 degrees or more can be used) for about 30 min, and finally in 0.3× wash mix (alternatively, as in all final washes described herein, approximately, 0.2×, 0.4×, 0.6×, 0.8×, 1×, or any concentration between about 2× and about 6× can be used in conjunction with a suitable wash temperature) containing 0.1% SDS at 60° C. (alternatively, approximately 42, 44, 46, 48, 50, 52, 54, 56, 58, 62, 64, 66, 68, 70, or about 72 degrees or more can be used) for about 30 min. The filters are then air dried and exposed to x-ray film for autoradiography. In yet another alternative protocol, washing of filters is done for 1.5 h at 55° C. in a solution containing 2× SSC, 25 mM Tris-HCl (pH 7.4), 5 mM EDTA, and 0.1% SDS. The wash solution is replaced with fresh solution and incubated an additional 1.5 h at 60° C. Filters are then blotted dry and exposed for autoradiography. If necessary, filters are washed for a third time at 65-68° C. and reexposed to film. Other conditions of low stringency which may be used are well known in the art (e.g., as employed for cross-species hybridizations). Preferably, GTS variants identified or isolated using the above methods will also encode a functionally equivalent gene product (i.e., protein, polypeptide, or domain thereof, encoding or otherwise associated with a function or structure at least partially encoded by the complementary GTS).

[0053] Additionally contemplated are polynucleotides encoding at least one ORF, or its functional equivalent, encoded by a polynucleotide sequence that is at least about 99, 95, 90, or about 85 percent similar or identical to corresponding region of a GTS described in the Sequence Listing (as measured by BLAST sequence comparison analysis using, for example, the GCG sequence analysis package using standard default settings).

[0054] Additional embodiments contemplated by the present invention include any polynucleotide sequence comprising a continuous stretch of nucleotide sequence originally disclosed in, or otherwise unique to, any of the GTSs of SEQ ID NOS:9-1,008 that are at least 8, or at least 10, or at least 14, or at least 20, or at least 30, or at least about 40, and preferably at least about 60 consecutive nucleotides up to about several hundred bases of nucleotide sequence or an entire GTS sequence. Functional equivalents of the gene products of SEQ ID NOS:9-1,008 include naturally occurring variants of SEQ ID NOS:9-1,008 present in other species, and mutant variants, both naturally occurring and engineered, which retain at least some of the functional activities of the gene products of SEQ ID NOS:9-1,008.

[0055] Another embodiment of the present invention contemplates GTS fragments of at least 8, 9, 10, 11, 12, 13, 14, 15, 16, 17, 18, 19, 20, 21, 22, 23, 24, 25, 26, 27, 28, 29, 30, 31, 32, 33, 34, 35, 36, 37, 38, 39, 40, 41, 42, 43, 44, 45, 46, 47, 48, 49, 50, 51, 52, 53, 54, 55, 56, 57, 58, 59, 60, 61, 62, 63, 64, 65, 66, 67, 68, 69, 70, 71, 72, 73, 74, 75, 76, 77, 78, 79, 80, 81, 82, 83, 84, 85, 86, 87, 88, 89, 90, 91, 92, 93, 94, 95, 96, 97, 98, 99, 100, 125, 150, 175, 200, 250, 300, and 350 nucleotides. Another embodiment of the invention contemplates fragments of at least 3, 4, 5, 6, 7, 8, 9, 10, 11, 12, 13, 14, 15, 16, 17, 18, 19, 20, 21, 22, 23, 24, 25, 26, 27, 28, 29, 30, 31, 32, 33, 34, 35, 40, 50, 60, 70, 80, 90, and 100 amino acids encoded by the described GTSs.

[0056] The invention also includes degenerate variants of the claimed GTS sequences, and products encoded thereby. The invention further includes GTS derivatives wherein any of the disclosed GTSs, or GTS variants, is linked to another polynucleotide molecule, or a fragment thereof, wherein the link may be either directly or through other polynucleotides of any sequence and of a length of about 1,000 base pairs, or about 500 base pairs, or about 300 base pairs, or about 200 base pairs, or about 150 base pairs, or about 100 base pairs or about 50 base pairs, or less.

[0057] The invention also particularly includes polynucleotide molecules, including DNA, that hybridize to, and are therefore the complements of, the nucleotide sequences of the disclosed GTSs. Such hybridization conditions may be highly stringent or less highly stringent, as described above. In instances wherein the nucleic acid molecules are deoxyoligonucleotides (“DNA oligos”), highly stringent conditions may refer to, for example, washing in 6' SSC/0.05% sodium pyrophosphate at 37° C. (for oligos having 14-base DNA oligos), 48° C. (for 17-base DNA oligos), 550 C (for 20-base DNA oligos), and 60° C. (for 23-base oligos). Similar conditions are contemplated for RNA oligos corresponding to a portion of the disclosed GTS sequences.

[0058] These nucleic acid molecules may encode or act as antisense molecules to polynucleotides comprising at least a portion of the sequences shown in SEQ ID NOS:9-1,008 that are useful, for example, to regulate the expression of genes comprising a nucleotide sequence of any of SEQ ID NOS:9-1,008, and can also be used, for example, as antisense primers in amplification reactions of gene sequences. With respect to gene regulation, such techniques can be used to regulate, for example, developmental processes by modulating the expression of genes in embryonic stem cells. Further, such sequences may be used as part of ribozyme and/or triple helix sequences that can be used to regulate gene expression. Still further, such molecules may be used as components of diagnostic methods whereby, for example, the presence of a particular allele, of a gene that contains any of the sequences of SEQ ID NOS:9-1,008 may be detected. Of particular interest is the use of the disclosed GTSs to conduct analysis of single nucleotide polymorphisms (SNPs), and particularly coding region SNPs or “cSNPs”, in the human genome, or as general or individual-specific forensic markers. When so applied, a collection of GTSs is obtained from an individual, and screened against a control database of cSNPs (or other genetic markers) that have previously been associated with disease, suitability or susceptibility (or sensitivity) to specific drugs or therapies, or virtually any other human trait that correlates with a given cSNP or genetic marker, or assortment thereof. In addition to disease/diagnostic testing, the described GTSs are also useful as genetic markers for the prenatal analysis of congenital traits or defects.

[0059] In addition to the nucleotide sequences described above, full length cDNA or gene sequences that contain any of SEQ ID NOS:9-1,008 present in the same species and/or homologs of any of those genes present in other species can be identified and isolated by using molecular biological techniques known in the art.

[0060] In order to clone the full length cDNA sequence from any species encoding the cDNA corresponding to the entire messenger RNA or to clone variant or heterologous forms of the molecule, labeled DNA probes made from nucleic acid fragments corresponding to any of the partial cDNA disclosed herein may be used to screen a cDNA library. For example, oligonucleotides corresponding to either the 5′ or 3′ terminus of the cDNA sequence may be used to obtain longer nucleotide sequences. Briefly, the library may be plated out to yield a maximum of about 30,000 pfu for each 150 mm plate. Approximately 40 plates may be screened. The plates are incubated at 37° C. until the plaques reach a diameter of 0.25 mm or are just beginning to make contact with one another (3-8 hours). Nylon filters are placed onto the soft top agarose and after 60 seconds, the filters are peeled off and floated on a DNA denaturing solution consisting of 0.4N sodium hydroxide. The filters are then immersed in neutralizing solution consisting of 1 M Tris HCl, pH 7.5, before being allowed to air dry. The filters are prehybridized in casein hybridization buffer containing 10% dextran sulfate, 0.5 M NaCl, 50 mM Tris HCL, pH 7.5, 0.1% sodium pyrophosphate, 1% casein, 1% SDS, and denatured salmon sperm DNA at 0.5 mg/ml for 6 hours at 60° C. The radiolabelled probe is then denatured by heating to 95° C. for 2 minutes and then added to the prehybridization solution containing the filters. The filters are hybridized at 60° C. (alternatively, as in all hybridizations described herein, approximately 42, 44, 46, 48, 50. 52, 54, 56, 58, 62, 64, 66, 68, 70, or about 72 degrees or more can be used) for about 16 hours. The filters are then washed in approximately 1× wash mix (10× wash mix contains 3M NaCl, 0.6M Tris base, and 0.02M EDTA, alternatively, as with all washes described herein, 2×, 3×, 4×, 5×, 6× wash mix, or more, can be used) twice for 5 minutes each at room temperature, then in 1× wash mix containing 1% SDS at 60° C. (alternatively, as in all washes described herein, approximately 42, 44, 46, 48, 50. 52, 54, 56, 58, 62, 64, 66, 68, 70, or about 72 degrees or more can be used) for about 30 min, and finally in 0.3× wash mix (alternatively, as in all final washes described herein, approximately, 0.2×, 0.4×, 0.6×, 0.8×, 1×, or any concentration between about 2× and about 6× can be used in conjunction with a suitable wash temperature) containing 0.1% SDS at 60° C. (alternatively, approximately 42, 44, 46, 48, 50. 52, 54, 56, 58, 62, 64, 66, 68, 70, or about 72 degrees or more can be used) for about 30 min. The filters are then air dried and exposed to x-ray film for autoradiography. After developing, the film is aligned with the filters to select a positive plaque. If a single, isolated positive plaque cannot be obtained, the agar plug containing the plaques will be removed and placed in lambda dilution buffer containing 0.1M NaCl, 0.01M magnesium sulfate, 0.035M Tris HCl, pH 7.5, 0.01% gelatin. The phage may then be replated and rescreened to obtain single, well isolated positive plaques. Positive plaques may be isolated and the cDNA clones sequenced using primers based on the known cDNA sequence. This step may be repeated until a full length cDNA is obtained.

[0061] It may be necessary to screen multiple cDNA libraries from different sources/tissues to obtain a full length cDNA. In the event that it is difficult to identify cDNA clones encoding the complete 5′ terminal coding region, an often encountered situation in cDNA cloning, the RACE (Rapid Amplification of cDNA Ends) technique may be used. RACE is a proven PCR-based strategy for amplifying the 5′ end of incomplete cDNAs. 5′-RACE-Ready cDNA synthesized from human fetal liver containing a unique anchor sequence is commercially available (Clontech). To obtain the 5′ end of the cDNA, PCR is carried out, for example, on 5′-RACE-Ready cDNA using the provided anchor primer and the 3′ primer. A secondary PCR reaction is then carried out using the anchored primer and a nested 3′ primer according to the manufacturer's instructions.

[0062] Once obtained, the full length cDNA sequence may be translated into amino acid sequence and examined for certain landmarks found in the amino acid sequences encoded by SEQ ID NOS:9-1,008, or any structural similarities to these disclosed sequences.

[0063] The identification of homologs, heterologs, or paralogs of SEQ ID NOS:9-1,008 in other, preferably related, species can be useful for developing additional animal model systems that are closely related to humans for purposes of drug discovery. Genes at other genetic loci within the genome that encode proteins which have extensive homology to one or more domains of the gene products encoded by SEQ ID NOS:9-1,008 can also be identified via similar techniques. In the case of cDNA libraries, such screening techniques can identify clones derived from alternatively spliced transcripts in the same or different species.

[0064] Screening can be done using filter hybridization with duplicate filters. The labeled probe can contain at least 15-30 base pairs of the nucleotide sequence presented in SEQ ID NOS:9-1,008. The hybridization washing conditions used should be of a lower stringency when the cDNA library is derived from an organism different from, or heterologous to, the type of organism from which the labeled sequence was derived. With respect to the cloning of a mammalian homolog, heterolog, ortholog, or paralog, using probes derived from any of the sequences of SEQ ID NOS:9-1,008, for example, hybridization can, for example, be performed at 65° C. overnight in Church's buffer (7% SDS, 250 mM NaHPO₄, 2 mM EDTA, 1% BSA). Washes can be done with 2× SSC, 0.1% SDS at 65° C. and then at 0.1× SSC, 0.1% SDS at 65° C.

[0065] Low stringency conditions are well known to those of skill in the art, and will vary predictably depending on the specific organisms from which the library and the labeled sequences are derived. For guidance regarding such conditions see, for example, Sambrook et al., 1989, Molecular Cloning, A Laboratory Manual, Cold Springs Harbor Press, N.Y.; and Ausubel et al., 1989, Current Protocols in Molecular Biology, Green Publishing Associates and Wiley Interscience, N.Y.

[0066] Alternatively, the labeled nucleotide probe of a sequence of any of SEQ ID NOS:9-1,008 may be used to screen a genomic library derived from the organism of interest, again, using appropriately stringent conditions. The identification and characterization of human genomic clones is helpful for designing diagnostic tests and clinical protocols for treating disorders in human patients that are known or suspected to be linked to disease or other developmental or cell differentiation disorders and abnormalities. For example, sequences derived from regions adjacent to the intron/exon boundaries of the human gene can be used to design primers for use in amplification assays to detect mutations within the exons, introns, splice sites (e.g., splice acceptor and/or donor sites), etc., that can be used in diagnostics.

[0067] Further, gene homologs can also be isolated from nucleic acid of the organism of interest by performing PCR using two oligonucleotide primers derived from SEQ ID NOS:9-1,008, or two degenerate oligonucleotide primer pools designed on the basis of amino acid sequences within the gene products encoded by SEQ ID NOS:9-1,008. The template for the reaction may be cDNA obtained by reverse transcription of mRNA prepared from, for example, human or non-human cell lines, cell types, or tissues, like, for example, ES cells from the organism of interest.

[0068] The PCR product may be subcloned or sequenced directly or subcloned and sequenced to ensure that the amplified sequences represent the sequences of the gene corresponding to the sequence of SEQ ID NOS:9-1,008 of interest. The PCR fragment may then be used to isolate a full length cDNA clone by a variety of methods. For example, the amplified fragment may be labeled and used to screen a cDNA library, such as a bacteriophage cDNA library. Alternatively, the labeled fragment may be used to isolate genomic clones via the screening of a genomic library.

[0069] PCR technology may also be utilized to isolate full length cDNA sequences. For example, RNA may be isolated, following standard procedures from an appropriate cellular source (i.e., one known, or suspected, to express the gene corresponding to the sequence of SEQ ID NOS:9-1,008 of interest, such as, for example, ES cells). A reverse transcription reaction may be performed on the RNA using an oligonucleotide primer specific for the most 5′ end of the amplified fragment for the priming of first strand synthesis. The resulting RNA/DNA hybrid may then be “tailed” with guanines, for example, using a standard terminal transferase reaction, the hybrid may be digested with RNase H, and second strand synthesis may then be primed with a poly-C primer. Thus, cDNA sequences upstream from the amplified fragment may easily be isolated. For a review of cloning strategies which may be used, see e.g., Sambrook et al., 1989, supra. Alternatively, cDNA or genomic libraries can be screened using 5′ PCR primers that hybridize to vector sequences and 3′ PCR primers specific to the gene of interest. Typically, such primers comprise oligonucleotide “priming” sequences first disclosed in, or otherwise unique to, one of the GTSs of SEQ ID NOS:9-1,008.

[0070] The sequence of a gene corresponding to any of the sequences of SEQ ID NOS:9-1,008 can also be used to isolate mutant alleles of that gene. Such mutant alleles may be isolated from individuals either known or suspected to have a genotype which contributes to the disease of interest or other symptoms of developmental and cell differentiation and/or proliferation disorders and abnormalities. Mutant alleles and mutant allele products may then be utilized in the therapeutic and diagnostic programs described below. Additionally, such sequences of any of the genes corresponding to SEQ ID NOS:9-1,008 can be used to detect gene regulatory (e.g., promoter or promoter/enhancer) defects which can affect development or cell differentiation.

[0071] A cDNA of a mutant gene corresponding to any of the sequences of SEQ ID NOS:9-1,008 can be isolated as discussed above, or, for example, by using PCR. In this case, the first cDNA strand may be synthesized by hybridizing an oligo-dT oligonucleotide to mRNA isolated from cells derived from an individual suspected of carrying a mutant gene corresponding to any of the sequences of SEQ ID NOS:9-1,008 by extending the new strand with reverse transcriptase. The second strand of the cDNA is then synthesized using an oligonucleotide that hybridizes specifically to the 5′ region of the normal gene. The amplified product can be directly sequenced or cloned into a suitable vector and subsequently subjected to DNA sequence analysis. By comparing the DNA sequence of the mutant allele to that of the normal allele, the mutation(s) responsible for the loss or alteration of function of the mutant gene product can be ascertained.

[0072] Alternatively, a genomic library can be constructed using DNA obtained from one or more individuals suspected of carrying, or known to carry, a mutant allele corresponding to any of SEQ ID NOS:9-1,008. Corresponding mutant cDNA libraries can be also constructed using RNA from cell types known, or suspected, to express such mutant alleles. The corresponding normal gene, or any suitable fragment thereof, may then be labeled and used as a probe to identify the corresponding mutant allele in such libraries. Clones containing the mutant gene sequences may then be identified and analyzed by DNA sequence analysis. Additionally, a protein expression library can be constructed utilizing cDNA synthesized from, for example, RNA isolated from a cell type known, or suspected, to express a mutant allele corresponding to any of the sequences of SEQ ID NOS:9-1,008 from an individual suspected of, carrying or known to carry, such a mutant allele. In this manner, gene products made by the putatively mutant cell type may be expressed and screened using standard antibody screening techniques in conjunction with antibodies raised against the corresponding normal gene product or a portion thereof, as described below in Section 5.4 (For screening techniques, see, for example, Harlow, E. and Lane, eds., 1988, “Antibodies: A Laboratory Manual”, Cold Spring Harbor Press, Cold Spring Harbor.) Additionally, screening can be accomplished by screening with labeled fusion proteins. In cases where a mutation results in an expressed gene product with altered function (e.g., as a result of a missense or a frame shift mutation), a polyclonal set of antibodies to the wild-type gene product are likely to cross-react with the mutant gene product. Library clones detected via their reaction with such labeled antibodies can be purified and subjected to sequence analysis according to methods well known to those of skill in the art.

[0073] The invention also encompasses nucleotide sequences that encode mutant isoforms of any of the amino acid sequences encoded by the GTSs of SEQ ID NOS:9-1,008, peptide fragments thereof, truncated versions thereof, and fusion proteins including any of the above. Examples of such fusion proteins can include, but not limited to, an epitope tag which aids in purification or detection of the resulting fusion protein; or an enzyme, fluorescent protein, luminescent protein which can be used as a marker.

[0074] The present invention additionally encompasses (a) RNA or DNA vectors that contain any portion of SEQ ID NOS:9-1,008 and/or their complements as well as any of the peptides or proteins encoded thereby; (b) DNA vectors that contain a cDNA that substantially spans the entire open reading frame corresponding to any of the sequences of SEQ ID NOS:9-1,008 and/or their complements; (c) DNA expression vectors that have or contain any of the foregoing sequences, or a portion thereof, operatively associated with a (d) genetically engineered host cells that contain a cDNA that spans the entire open reading frame, or any portion thereof, corresponding to any of the sequences of SEQ ID NOS:9-1,008 operatively associated with a regulatory element, generally recombinantly positioned either in vivo (such as in gene activation) or in vitro, that directs the expression of the coding sequences in the host cell. As used herein, regulatory elements include, but are not limited to, inducible and non-inducible promoters, enhancers, operators and other elements known to those skilled in the art that drive and regulate expression. Such regulatory elements include, but are not limited to, the baculovirus promoter, cytomegalovirus hCMV immediate early gene promoter, the early or late promoters of SV40 adenovirus, the lac system, the trp system, the TAC system, the TRC system, the major operator and promoter regions of phage A, the control regions of fd coat protein, acid phosphatase promoters, phosphoglycerate kinase (PGK) and especially 3-phosphoglycerate kinase promoters, and yeast alpha mating factors.

[0075] 5.2 Proteins and Polypeptides Encoded by Polynucleotides Expressed in Modified Human Cells

[0076] Peptides and proteins encoded by the open reading frame of mRNAs corresponding to SEQ ID NOS:9-1,008, polypeptides and peptide fragments, mutated, truncated or deleted forms of those peptides and proteins, fusion proteins containing any of those peptides and proteins can be prepared for a variety of uses, including, but are not limited to, the generation of antibodies, as reagents in diagnostic assays, the identification of other cellular gene products involved in the regulation of development and cellular differentiation of various cell types, like, for example, ES cells, as reagents in assays for screening for compounds that can be used in the treatment of disorders affecting development and cell differentiation, and as pharmaceutical reagents useful in the treatment of disorders affecting development and cell differentiation.

[0077] The invention also encompasses proteins, peptides, and polypeptides that are functionally equivalent to those encoded by SEQ ID NOS:9-1,008. Such functionally equivalent products include, but are not limited to, additions or substitutions of amino acid residues within the amino acid sequence encoded by the nucleotide sequences described above, but which result in a silent change, thus producing a functionally equivalent gene product. Amino acid substitutions can be made on the basis of similarity in polarity, charge, solubility, hydrophobicity, hydrophilicity, and/or the amphipathic nature of the residues involved. For example, nonpolar (hydrophobic) amino acids include alanine, leucine, isoleucine, valine, proline, phenylalanine, tryptophan, and methionine; polar neutral amino acids include glycine, serine, threonine, cysteine, tyrosine, asparagine, and glutamine; positively charged (basic) amino acids include arginine, lysine, and histidine; and negatively charged (acidic) amino acids include aspartic acid and glutamic acid.

[0078] While random mutations can be introduced into DNA encoding peptides and proteins of the current invention (using random mutagenesis techniques well known to those skilled in the art), and the resulting mutant peptides and proteins tested for activity, site-directed mutations of the coding sequence can be engineered (using standard site-directed mutagenesis techniques) to generate mutant peptides and proteins of the current invention having increased functionality.

[0079] For example, the amino acid sequence of peptides and proteins of the current invention can be aligned with homologs from different species. Mutant peptides and proteins can be engineered so that regions of interspecies identity are maintained, whereas the variable residues are altered, e.g., by deletion or insertion of an amino acid residue(s) or by substitution of one or more different amino acid residues. Conservative alterations at the variable positions can be engineered in order to produce a mutant form of a peptide or protein of the current invention that retains function. Non-conservative changes can be engineered at these variable positions to alter function. Alternatively, where alteration of function is desired, deletion or non-conservative alterations of the conserved regions can be engineered. One of skill in the art may easily test such mutant or deleted form of a peptide or protein of the current invention for these alterations in function using the teachings presented herein.

[0080] Other mutations to the coding sequences described above can be made to generate peptides and proteins that are better suited for expression, scale up, etc. in the host cells chosen. For example, the triplet code for each amino acid can be modified to conform more closely to the preferential codon usage of the host cell's translational machinery, or, for example, to yield a messenger RNA molecule with a longer half-life. Those skilled in the art would readily know what modifications of the nucleotide sequence would be desirable to conform the nucleotide sequence to preferential codon usage or to make the messenger RNA more stable. Such information would be obtainable, for example, through use of computer programs, through review of available research data on codon usage and messenger RNA stability, and through other means known to those of skill in the art.

[0081] In addition, the novel GTS of the present invention encode novel ORFs. Such ORFs can occur in any of the six possible reading frames inherently present in the described GTSs. Such novel sequences can be used as, for example, epitope tags or for the generation of hybrid/fusion proteins. Accordingly, another aspect of the present invention includes isolated polynucleotides comprising a sequence first disclosed in a GTS of the Sequence Listing that encodes a protein that correspondingly comprise a novel peptide sequence encoded by at least a portion of one of the presently disclosed GTSs.

[0082] Peptides corresponding to one or more domains (or a portion of a domain) of one of the proteins described above, truncated or deleted proteins, as well as fusion proteins in which the full length protein described above, a subunit peptide or truncated version is fused to an unrelated protein are also within the scope of the invention and can be designed by those of skill in the art on the basis of experimental or functional considerations. Such fusion proteins include, but are not limited to, fusions to an epitope tag; or fusions to an enzyme, fluorescent protein, or luminescent protein which provide a marker function.

[0083] While the peptides and proteins of the current invention can be chemically synthesized (e.g., see Creighton, 1983, Proteins: Structures and Molecular Principles, W.H. Freeman & Co., N.Y.), large polypeptides derived from any of the polynucleotides described above may advantageously be produced by recombinant DNA technology using techniques well known in the art for expressing genes and/or coding sequences. These methods include, for example, in vitro recombinant DNA techniques, synthetic techniques, and in vivo genetic recombination. See, for example, the techniques described in Sambrook et al., 1989, supra, and Ausubel et al., 1989, supra. Alternatively, RNA capable of encoding any of the nucleotide sequences described above may be chemically synthesized using, for example, synthesizers. See, for example, the techniques described in “Oligonucleotide Synthesis”, 1984, Gait, M. J. ed., IRL Press, Oxford, which is incorporated by reference herein in its entirety.

[0084] An additional application of the described novel human polynucleotide sequences is their use in the molecular mutagenesis/evolution of proteins that are at least partially encoded by the described novel GTSs using, for example, polynucleotide shuffling or related methodologies. Such approaches are described in U.S. Pat. Nos. 5,830,721 and 5,837,458 which are herein incorporated by reference in their entirety.

[0085] A variety of host-expression vector systems may be utilized to express the nucleotide sequences of the invention. Where the peptide or protein to be synthesized is a soluble derivative, the peptide or polypeptide can be recovered from the culture, i.e., from the host cell in cases where the peptide or polypeptide is not secreted, and from the culture media in cases where the peptide or polypeptide is secreted by the cells. However, such engineered host cells themselves may be used in situations where it is important not only to retain the structural and functional characteristics of the expressed peptide or protein, but to assess biological activity, e.g., in drug screening assays.

[0086] The expression systems that may be used for purposes of the invention include, but are not limited to, microorganisms such as bacteria (e.g., E. coli, B. subtilis) transformed with recombinant bacteriophage DNA, plasmid DNA or cosmid DNA expression vectors containing a nucleotide sequence of the current invention; yeast (e.g., Saccharomyces, Pichia) transformed with recombinant yeast expression vectors containing a nucleotide sequence of the current invention; insect cell systems infected with recombinant virus expression vectors (e.g., baculovirus) containing a nucleotide sequence of the current invention; plant cell systems infected with recombinant virus expression vectors (e.g., cauliflower mosaic virus, CaMV; tobacco mosaic virus, TMV) or transformed with recombinant plasmid expression vectors (e.g., Ti plasmid) containing a nucleotide sequence of the current invention; or mammalian cell systems (e.g., COS, CHO, BHK, 293, 3T3, U937) harboring recombinant expression constructs containing promoters derived from the genome of mammalian cells (e.g., metallothionein promoter) or from mammalian viruses (e.g., the adenovirus late promoter; the vaccinia virus 7.5 K promoter).

[0087] In bacterial systems, a number of expression vectors may be advantageously selected depending upon the use intended for the gene product being expressed. For example, when large quantities of such a protein are to be produced for the generation of pharmaceutical compositions of a protein or for raising antibodies to the protein to be expressed, for example, vectors which direct the expression of high levels of fusion protein products that are readily purified may be desirable. Such vectors include, but are not limited, to the E. coli expression vector pUR278 (Ruther et al., 1983, EMBO J. 2:1791), in which the coding sequence of the polynucleotide to be expressed may be ligated individually into the vector in frame with the lacZ coding region so that a fusion protein is produced; pIN vectors (Inouye & Inouye, 1985, Nucleic Acids Res. 13:3101-3109; Van Heeke & Schuster, 1989, J. Biol. Chem. 264:5503-5509); and the like. pGEX vectors may also be used to express foreign polypeptides as fusion proteins with glutathione S-transferase (GST). If the inserted sequence encodes a relatively small polypeptide (less than 25 kD), such fusion proteins are generally soluble and can easily be purified from lysed cells by adsorption to glutathione-agarose beads followed by elution in the presence of free glutathione. The pGEX vectors are designed to include thrombin or factor Xa protease cleavage sites so that the cloned target gene product can be released from the GST moiety. Alternatively, if the resulting fusion protein is insoluble and forms inclusion bodies in the host cell, the inclusion bodies may be purified and the recombinant protein solubilized using techniques well known to one of skill in the art.

[0088] In an insect system, Autographa californica nuclear polyhidrosis virus (AcNPV) may be used as a vector to express foreign genes. (e.g., see Smith et al., 1983, J. Virol. 46: 584; Smith, U.S. Pat. No. 4,215,051). In one embodiment of the current invention, Sf9 insect cells are infected with a baculovirus vector expressing a peptide or protein of the current invention.

[0089] In mammalian host cells, a number of viral-based expression systems may be utilized. Specific embodiments (described more fully below) include the gene trap cDNA sequences of the current invention that are expressed by a CMV promoter to transiently express recombinant protein in U937 cells or in Cos-7 cells. Alternatively, retroviral vector systems well known in the art may be used to insert the recombinant expression construct into host cells, or vaccinia virus-based expression systems may be employed.

[0090] In yeast, a number of vectors containing constitutive or inducible promoters may be used. For a review, see Current Protocols in Molecular Biology, Vol. 2, 1988, Ed. Ausubel et al., Greene Publish. Assoc. & Wiley Interscience, Ch. 13; Grant et al., 1987, Expression and Secretion Vectors for Yeast, in Methods in Enzymology, Eds. Wu & Grossman, 1987, Acad. Press, N.Y., Vol. 153, pp. 516-544; Glover, 1986, DNA Cloning, Vol. II, IRL Press, Wash., D.C., Ch. 3; and Bitter, 1987, Heterologous Gene Expression in Yeast, Methods in Enzymology, Eds. Berger & Kimmel, Acad. Press, N.Y., Vol. 152, pp. 673-684; and The Molecular Biology of the Yeast Saccharomyces, 1982, Eds. Strathern et al., Cold Spring Harbor Press, Vols. I and II.

[0091] In cases where plant expression vectors are used, the expression of the coding sequence may be driven by any of a number of promoters. For example, viral promoters such as the 35S RNA and 19S RNA promoters of CaMV (Brisson et al., 1984, Nature, 310:511-514), or the coat protein promoter of TMV (Takamatsu et al., 1987, EMBO J. 6:307-311) may be used; alternatively, plant promoters such as the small subunit of RUBISCO (Coruzzi et al., 1984, EMBO J. 3:1671-1680; Broglie et al., 1984, Science 224:838-843); or heat shock promoters, e.g., soybean hsp17.5-E or hsp17.3-B (Gurley et al., 1986, Mol. Cell. Biol. 6:559-565) may be used. These constructs can be introduced into plant cells using Ti plasmids, Ri plasmids, plant virus vectors, direct DNA transformation, microinjection, electroporation, etc. For reviews of such techniques see, for example, Weissbach & Weissbach, 1988, Methods for Plant Molecular Biology, Academic Press, NY, Section VIII, pp. 421-463; and Grierson & Corey, 1988, Plant Molecular Biology, 2d Ed., Blackie, London, Ch. 7-9.

[0092] In cases where an adenovirus is used as an expression vector, the nucleotide sequence of interest may be ligated to an adenovirus transcription/translation control complex, e.g., the late promoter and tripartite leader sequence. This chimeric gene may then be inserted in the adenovirus genome by in vitro or in vivo recombination. Insertion in a non-essential region of the viral genome (e.g., region E1 or E3) will result in a recombinant virus that is viable and capable of expressing the gene product of interest in infected hosts. (e.g., See Logan & Shenk, 1984, Proc. Natl. Acad. Sci. USA 81:3655-3659). Specific initiation signals may also be required for efficient translation of inserted nucleotide sequences of interest. These signals include the ATG initiation codon and adjacent sequences. In cases where an entire gene or cDNA, including its own initiation codon and adjacent sequences, is inserted into the appropriate expression vector, no additional translational control signals may be needed. However, in cases where only a portion of a coding sequence of interest is inserted, exogenous translational control signals, including, perhaps, the ATG initiation codon, must be provided. Furthermore, the initiation codon must be in phase with the reading frame of the desired coding sequence to ensure translation of the entire insert. These exogenous translational control signals and initiation codons can be of a variety of origins, both natural and synthetic. The efficiency of expression may be enhanced by the inclusion of appropriate transcription enhancer elements, transcription terminators, etc. (See Bittner et al., 1987, Methods in Enzymol. 153:516-544).

[0093] In addition, a host cell strain may be chosen which modulates the expression of the inserted sequences, or modifies and processes the gene product in the specific fashion desired. Such modifications (e.g., glycosylation) and processing (e.g., cleavage) of protein products may be important for the function of the protein. Different host cells have characteristic and specific mechanisms for the post-translational processing and modification of proteins and gene products. Appropriate cell lines or host systems can be chosen to ensure the correct modification and processing of the foreign protein expressed. To this end, eukaryotic host cells which possess the cellular machinery for proper processing of the primary transcript may be used. Such mammalian host cells include, but are not limited to, CHO, VERO, BHK, Hela, COS, MDCK, 293, 3T3, WI38, and U937 cells.

[0094] For long-term, high-yield production of recombinant proteins, stable expression is preferred. For example, cell lines which stably express the sequences of interest described above may be engineered. Rather than using expression vectors which contain viral origins of replication, host cells can be transformed with DNA controlled by appropriate expression control elements (e.g., promoter, enhancer sequences, transcription terminators, polyadenylation sites, etc.), and a selectable marker. Following the introduction of the foreign DNA, engineered cells may be allowed to grow for 1-2 days in an enriched media, and then are switched to a selective media. The selectable marker in the recombinant plasmid confers resistance to the selection and allows cells to stably integrate the plasmid into their chromosomes and grow to form foci which in turn can be cloned and expanded into cell lines. This method may advantageously be used to engineer cell lines which express the gene product of interest. Such engineered cell lines may be particularly useful in screening and evaluation of compounds that affect the endogenous activity of the gene product of interest.

[0095] A number of selection systems may be used, including, but are not limited to, the herpes simplex virus thymidine kinase (Wigler et al., 1977, Cell 11:223), hypoxanthine-guanine phosphoribosyltransferase (Szybalska & Szybalski, 1962, Proc. Natl. Acad. Sci. USA 48:2026), and adenine phosphoribosyltransferase (Lowy et al., 1980, Cell 22:817) genes can be employed in tk⁻, hgprt⁻ or aprt⁻ cells, respectively. Also, antimetabolite resistance can be used as the basis of selection for the following genes: dhfr, which confers resistance to methotrexate (Wigler et al., 1980, Natl. Acad. Sci. USA 77:3567; O'Hare et al., 1981, Proc. Natl. Acad. Sci. USA 78:1527); gpt, which confers resistance to mycophenolic acid (Mulligan & Berg, 1981, Proc. Natl. Acad. Sci. USA 78:2072); neo, which confers resistance to the aminoglycoside G-418 (Colberre-Garapin et al., 1981, J. Mol. Biol. 150:1); and hygro, which confers resistance to hygromycin (Santerre et al., 1984, Gene 30:147).

[0096] The gene products of interest can also be expressed in transgenic animals. Animals of any species, including, but not limited to, mice, rats, rabbits, guinea pigs, pigs, micro-pigs, goats, and non-human primates, e.g., baboons, monkeys, and chimpanzees may be used to generate transgenic animals carrying the polynucleotide of interest of the current invention.

[0097] Any technique known in the art may be used to introduce the transgene of interest into animals to produce the founder lines of transgenic animals. Such techniques include, but are not limited to pronuclear microinjection (Hoppe, P. C. and Wagner, T. E., 1989, U.S. Pat. No. 4,873,191); retrovirus mediated gene transfer into germ lines (Van der Putten et al., 1985, Proc. Natl. Acad. Sci., USA 82:6148-6152); gene targeting in embryonic stem cells (Thompson et al., 1989, Cell 56:313-321); electroporation of embryos (Lo, 1983, Mol Cell. Biol. 3:1803-1814); sperm-mediated gene transfer (Lavitrano et al., 1989, Cell 57:717-723); positive-negative selection as described in U.S. Pat. No. 5,464,764 herein incorporated by reference. For a review of such techniques, see Gordon, 1989, Transgenic Animals, Intl. Rev. Cytol. 115:171-229, which is incorporated by reference herein in its entirety.

[0098] The present invention provides for transgenic animals that carry the transgene of interest in all their cells, as well as animals which carry the transgene in some, but not all their cells, i.e., mosaic animals. The transgene may be integrated as a single transgene or in concatamers, e.g., head-to-head tandems or head-to-tail tandems. The transgene may also be selectively introduced into and activated in a particular cell type by following, for example, the teaching of Lasko et al. (Lasko, M. et al., 1992, Proc. Natl. Acad. Sci. USA 89:6232-6236). The regulatory sequences required for such a cell-type specific activation will depend upon the particular cell type of interest and will be apparent to those of skill in the art. When it is desired that the transgene of interest be integrated into the chromosomal site of the endogenous copy of that same gene, gene targeting is preferred. Briefly, when such a technique is to be utilized, vectors containing some nucleotide sequences homologous to the endogenous gene of interest are designed for the purpose of integrating, via homologous recombination with chromosomal sequences, into and disrupting the function of the nucleotide sequence of the endogenous gene of interest. In this way, the expression of the endogenous gene may also be eliminated by inserting non-functional sequences into the endogenous gene. The transgene may also be selectively introduced into a particular cell type, thus inactivating the endogenous gene of interest in only that cell type, by following, for example, the teaching of Gu et al. (Gu et al., 1994, Science 265: 103-106). The regulatory sequences required for such a cell-type specific inactivation will depend upon the particular cell type of interest, and will be apparent to those of skill in the art.

[0099] Once transgenic animals have been generated, the expression of the recombinant gene of interest may be assayed utilizing standard techniques. Initial screening may be accomplished by Southern blot analysis or PCR techniques to analyze animal tissues to assay whether integration of the transgene has taken place. The level of mRNA expression of the transgene in the tissues of the transgenic animals may also be assessed using techniques which include, but are not limited to, Northern blot analysis of cell type samples obtained from the animal, in situ hybridization analysis, and RT-PCR. Samples of gene-expressing tissue, may also be evaluated immunocytochemically using antibodies specific for the transgene product, as described below.

[0100] 5.3 Cells That Contain a Disrupted Allele of a Gene Encoding a Polynucleotide of the Current Invention

[0101] Another aspect of the current invention are cells which contain a gene that encodes a polynucleotide of the current invention and that has been disrupted. Those of skill in the art would know how to disrupt a gene in a cell using techniques known in the art. Also, techniques useful to disrupt a gene in a cell and especially an ES cell, that may already be disrupted, as disclosed in copending U.S. patent application Ser. Nos. 08/726,867; 08/728,963; 08/907,598; and 08/942,806, all of which are hereby incorporated herein by reference in their entirety, are within the scope of the current invention to disrupt a gene that encodes a polynucleotide of the current invention.

[0102] 5.3.1 Identification of Cells That Express Genes Encoding Polynucleotides of the Current Invention

[0103] Host cells that contain coding sequence and/or express a biologically active gene product, or fragment thereof, encoded by a gene corresponding to a GTS present invention may be identified by at least four general approaches; (a) DNA-DNA or DNA-RNA hybridization; (b) the presence or absence of “marker” gene functions; (c) assessing the level of transcription as measured by the expression of mRNA transcripts in the host cell; and (d) detection of the gene product as measured by immunoassay, enzymatic assay, chemical assay, or by its biological activity. Prior to screening for gene expression, the host cells can first be treated in an effort to increase the level of expression of genes encoding polynucleotides of the current invention, especially in cell lines that produce low amounts of the mRNAs and/or peptides and proteins of the current invention.

[0104] In the first approach, the presence of the coding sequence for peptides and proteins of the current invention inserted in the expression vector can be detected by DNA-DNA or DNA-RNA hybridization using probes comprising nucleotide sequences that are homologous to the coding sequence for peptides and proteins of the current invention, respectively, or portions or derivatives thereof.

[0105] In the second approach, the recombinant expression vector/host system can be identified and selected based upon the presence or absence of certain “marker” gene functions (e.g., thymidine kinase activity, resistance to antibiotics, resistance to methotrexate, transformation phenotype, occlusion body formation in baculovirus, etc.). For example, if the coding sequence for the peptide or protein of the current invention is inserted within a marker gene sequence of the vector, recombinants containing the coding sequence for the peptide or protein of the current invention can be identified by the absence of the marker gene function. Alternatively, a marker gene can be placed in tandem with the sequence for the peptide or protein of the current invention under the control of the same or different promoter used to control the expression of the coding sequence for the peptide or protein of the current invention. Expression of the marker in response to induction or selection indicates expression of the coding sequence for the peptide or protein of the current invention.

[0106] In the third approach, transcriptional activity for the coding region of genes specific for peptides and proteins of the current invention can be assessed by hybridization assays. For example, RNA can be isolated and analyzed by Northern blot using a probe derived from a GTS, or any portion thereof. Alternatively, total nucleic acids of the host cell may be extracted and assayed for hybridization to such probes. Additionally, RT-PCR (using GTS specific oligos/products) may be used to detect low levels of gene expression in a sample, or in RNA isolated from a spectrum of different tissues, or PCR can be used can be used to screen a variety of cDNA libraries derived from different tissues to determine which tissues express a given GTS.

[0107] In the fourth approach, the expression of the peptides and proteins of the current invention can be assessed immunologically, for example by Western blots, immunoassays such as radioimmuno-precipitation, enzyme-linked immunoassays and the like. This can be achieved by using an antibody and a binding partner specific to a peptide or protein of the current invention.

[0108] 5.4 Antibodies to Proteins of the Current Invention

[0109] Antibodies that specifically recognize one or more epitopes of a peptide or protein of the current invention, or epitopes of conserved variants of a peptide or protein at least partially encoded by a GTS of the present invention, or any and all peptide fragments thereof, are also encompassed by the invention. Such antibodies include, but are not limited to, polyclonal antibodies, monoclonal antibodies (mAbs), humanized or chimeric antibodies, single chain antibodies, Fab fragments, F(ab′)₂ fragments, fragments produced by a Fab expression library, anti-idiotypic (anti-Id) antibodies, and epitope-binding fragments of any of the above.

[0110] The antibodies of the invention may be used, for example, in the detection of the peptide or protein of interest of the current invention in a biological sample and may, therefore, be utilized as part of a diagnostic or prognostic technique whereby patients may be tested for abnormal amounts of these proteins. Such antibodies may also be utilized in conjunction with, for example, compound screening schemes as described, below in Section 5.6 for the evaluation of the effect of test compounds on expression and/or activity of the gene products of interest of the current invention. Additionally, such antibodies can be used in conjunction with the gene therapy and gene delivery techniques described below to, for example, evaluate the normal and/or engineered peptide- or protein-expressing cells prior to their introduction into the patient. Such antibodies may additionally be used as a method for inhibiting the abnormal activity of a peptide or protein of interest at least partially encoded by a GTS of the present invention. Thus, such antibodies may, for example, be utilized as part of treatment methods for development and cell differentiation disorders.

[0111] For the production of antibodies, various host animals may be immunized by injection with the peptide or protein of interest, a subunit peptide of such protein, a truncated polypeptide, functional equivalents of the peptide or protein, mutants of the peptide or protein, or denatured forms of the above. Such host animals may include, but are not limited to, rabbits, mice, and rats, to name but a few. Various adjuvants can be used to increase the immunological response, depending on the host species, including, but are not limited to, Freund's (complete and incomplete), mineral gels such as aluminum hydroxide, surface active substances such as lysolecithin, pluronic polyols, polyanions, peptides, oil emulsions, keyhole limpet hemocyanin, dinitrophenol, and potentially useful human adjutants such as BCG (bacille Calmette-Guerin) and Corynebacterium parvum. Polyclonal antibodies are heterogeneous populations of antibody molecules derived from the sera of the immunized animals.

[0112] Monoclonal antibodies, which are homogeneous populations of antibodies to a particular antigen, may be obtained by any technique which provides for the production of antibody molecules by continuous cell lines in culture. These include, but are not limited to, the hybridoma technique of Kohler and Milstein, (1975, Nature 256:495-497; and U.S. Pat. No. 4,376,110), the human B-cell hybridoma technique (Kosbor et al., 1983, Immunology Today 4:72; Cole et al., 1983, Proc. Natl. Acad. Sci. USA 80:2026-2030), and the EBV-hybridoma technique (Cole et al., 1985, Monoclonal Antibodies And Cancer Therapy, Alan R. Liss, Inc., pp. 77-96). Such antibodies may be of any immunoglobulin class including IgG, IgM, IgE, IgA, IgD and any subclass thereof. The hybridoma producing the mAb of this invention may be cultivated in vitro or in vivo. Production of high titers of mAbs in vivo makes this the presently preferred method of production.

[0113] In addition, techniques developed for the production of “chimeric antibodies” (Morrison et al., 1984, Proc. Natl. Acad. Sci. USA, 81:6851-6855; Neuberger et al., 1984, Nature, 312:604-608; Takeda et al., 1985, Nature, 314:452-454) by splicing the genes from a mouse antibody molecule of appropriate antigen specificity together with genes from a human antibody molecule of appropriate biological activity can be used. A chimeric antibody is a molecule in which different portions are derived from different animal species, such as those having a variable region derived from a porcine mAb and a human immunoglobulin constant region.

[0114] Alternatively, techniques described for the production of single chain antibodies (U.S. Pat. No. 4,946,778; Bird, 1988, Science 242:423-426; Huston et al., 1988, Proc. Natl. Acad. Sci. USA 85:5879-5883; and Ward et al., 1989, Nature 334:544-546) can be adapted to produce single chain antibodies against gene products of interest. Single chain antibodies are formed by linking the heavy and light chain fragments of the Fv region via an amino acid bridge, resulting in a single chain polypeptide.

[0115] Antibody fragments which recognize specific epitopes may be generated by known techniques. For example, such fragments include, but are not limited to: the F(ab′)₂ fragments which can be produced by pepsin digestion of the antibody molecule and the Fab fragments which can be generated by reducing the disulfide bridges of the F(ab′)₂ fragments. Alternatively, Fab expression libraries may be constructed (Huse et al., 1989, Science, 246:1275-1281) to allow rapid and easy identification of monoclonal Fab fragments with the desired specificity.

[0116] Antibodies to peptides and proteins that are fully or at least partially encoded by the described GTSs, or fragments or truncated versions thereof, can in turn be utilized to generate anti-idiotypic antibodies that “mimic” an epitope of the peptide or protein of interest, using techniques well known to those skilled in the art. (See, e.g., Greenspan & Bona, 1993, FASEB J 7(5):437-444; and Nissinoff, 1991, J. Immunol. 147(8):2429-2438). For example antibodies that bind to a regulatory peptide or protein of interest of the current invention and competitively inhibit the binding of such peptide or protein to any of its binding partners in the cell can be used to generate anti-idiotypes that “mimic” the peptide or protein of interest and, therefore, bind and neutralize the particular binding partner of the peptide or protein of interest. Such neutralizing antibodies, anti-idiotypes, Fab fragments of such antibodies, or humanized derivatives thereof, can be used in therapeutic regimens to mimic or neutralize (depending on the antibody) the effect of a particular peptide of interest, or a binding partner of a peptide or protein of interest.

[0117] 5.5 Diagnosis of Disorders Affecting Development and Cell Differentiation

[0118] A variety of methods can be employed for the diagnostic and prognostic evaluation of disorders involving developmental and differentiation processes, and for the identification of subjects having a predisposition to such disorders.

[0119] Such methods may, for example, utilize reagents such as the nucleotide sequences described above, and antibodies to peptides and proteins of the current invention, as described, in Section 5.4. Specifically, such reagents may be used, for example, for: (1) the detection of the presence of gene mutations, or the detection of either over- or under-expression of the respective mRNAs relative to the non-disorder state; (2) the detection of either an over- or an under-abundance of the respective gene product relative to the non-disorder state; and (3) the detection of perturbations or abnormalities in the intra- and inter-cellular processes mediated by the respective peptides or proteins of the current invention.

[0120] The methods described herein may be performed, for example, by utilizing pre-packaged diagnostic kits comprising at least one specific nucleotide sequence of the current invention or antibody reagent described herein, which may be conveniently used, e.g., in clinical settings, to diagnose patients exhibiting developmental or cell differentiation disorder abnormalities.

[0121] For the detection of mutations in any of the genes described above, any nucleated cell can be used as a starting source for genomic nucleic acid. For the detection of gene expression or gene products, any cell type or tissue in which the gene of interest is expressed, such as, for example, ES cells, may be utilized. Specific examples of cells and tissues that can be analyzed using the claimed polynucleotides include, but are not limited to, endothelial cells, epithelial cells, islets, neurons or neural tissue, mesothelial cells, osteocytes, lymphocytes, chondrocytes, hematopoietic cells, immune cells, cells of the major glands or organs (e.g., lung, heart, stomach, pancreas, kidney, skin, etc.), exocrine and/or endocrine cells, embryonic and other stem cells, fibroblasts, and culture adapted and/or transformed versions of the above. Diseases or natural processes that can also be correlated with the expression of mutant, or normal, variants of the disclosed GTSs include, but are not limited to, aging, cancer, autoimmune disease, lupus, scleroderma, Crohn's disease, multiple sclerosis, inflammatory bowel disease, immune disorders, schizophrenia, psychosis, alopecia, glandular disorders, inflammatory disorders, ataxia telangiectasia, diabetes, skin disorders such as acne, eczema, and the like, osteo and rheumatoid arthritis, high blood pressure, atherosclerosis, cardiovascular disease, pulmonary disease, degenerative diseases of the neural or skeletal systems, Alzheimer's disease, Parkinson's disease, osteoporosis, asthma, developmental disorders or abnormalities, genetic birth defects, infertility, epithelial ulcerations, and viral, parasitic, fungal, yeast, or bacterial infection.

[0122] Primary, secondary, or culture-adapted variants of cancer cells/tissues can also be analyzed using the claimed polynucleotides. Examples of such cancers include, but are not limited to, Cardiac: sarcoma (angiosarcoma, fibrosarcoma, rhabdomyosarcoma, liposarcoma), myxoma, rhabdomyoma, fibroma, lipoma and teratoma; Lung: bronchogenic carcinoma (squamous cell, undifferentiated small cell, undifferentiated large cell, adenocarcinoma), alveolar (bronchiolar) carcinoma, bronchial adenoma, sarcoma, lymphoma, chondromatous hamartoma, mesothelioma; Gastrointestinal: esophagus (squamous cell carcinoma, adenocarcinoma, leiomyosarcoma, lymphoma), stomach (carcinoma, lymphoma, leiomyosarcoma), pancreas (ductal adenocarcinoma, insulinoma, glucagonoma, gastrinoma, carcinoid tumors, vipoma), small bowel (adenocarcinoma, lymphoma, carcinoid tumors, Karposi's sarcoma, leiomyoma, hemangioma, lipoma, neurofibroma, fibroma), large bowel (adenocarcinoma, tubular adenoma, villous adenoma, hamartoma, leiomyoma); Genitourinary tract: kidney (adenocarcinoma, Wilm's tumor [nephroblastoma], lymphoma, leukemia), bladder and urethra (squamous cell carcinoma, transitional cell carcinoma, adenocarcinoma), prostate (adenocarcinoma, sarcoma), testis (seminoma, teratoma, embryonal carcinoma, teratocarcinoma, choriocarcinoma, sarcoma, interstitial cell carcinoma, fibroma, fibroadenoma, adenomatoid tumors, lipoma); Liver: hepatoma (hepatocellular carcinoma), cholangiocarcinoma, hepatoblastoma, angiosarcoma, hepatocellular adenoma, hemangioma; Bone: osteogenic sarcoma (osteosarcoma), fibrosarcoma, malignant fibrous histiocytoma, chondrosarcoma, Ewing's sarcoma, malignant lymphoma (reticulum cell sarcoma), multiple myeloma, malignant giant cell tumor, chordoma, osteochronfroma (osteocartilaginous exostoses), benign chondroma, chondroblastoma, chondromyxofibroma, osteoid osteoma and giant cell tumors; Nervous system: skull (osteoma, hemangioma, granuloma, xanthoma, osteitis deformans), meninges (meningioma, meningiosarcoma, gliomatosis), brain (astrocytoma, medulloblastoma, glioma, ependymoma, germinoma [pinealoma], glioblastoma multiforme, oligodendroglioma, schwannoma, retinoblastoma, congenital tumors), spinal cord (neurofibroma, meningioma, glioma, sarcoma); Gynecological: uterus (endometrial carcinoma), cervix (cervical carcinoma, pre-tumor cervical dysplasia), ovaries (ovarian carcinoma [serous cystadenocarcinoma, mucinous cystadenocarcinoma, endometrioid tumors, celioblastoma, clear cell carcinoma, unclassified carcinoma], granulosa-thecal cell tumors, Sertoli-Leydig cell tumors, dysgerminoma, malignant teratoma), vulva (squamous cell carcinoma, intraepithelial carcinoma, adenocarcinoma, fibrosarcoma, melanoma), vagina (clear cell carcinoma, squamous cell carcinoma, botryoid sarcoma [embryonal rhabdomyosarcoma], fallopian tubes (carcinoma); Hematologic: blood (myeloid leukemia [acute and chronic], acute lymphoblastic leukemia, chronic lymphocytic leukemia, myeloproliferative diseases, multiple myeloma, myelodysplastic syndrome), Hodgkin's disease, non-Hodgkin's lymphoma [malignant lymphoma]; Skin: malignant melanoma, basal cell carcinoma, squamous cell carcinoma, Karposi's sarcoma, moles, dysplastic nevi, lipoma, angioma, dermatofibroma, keloids, psoriasis; Breast: carcinoma and sarcoma, and Adrenal glands: neuroblastoma.

[0123] Nucleic acid-based detection techniques and peptide detection techniques that can be used to conduct the above analyses are described below.

[0124] 5.5.1. Detection of the Genes of the Current Invention and Their Respective Transcripts

[0125] Mutations within the genes of the current invention can be detected by utilizing a number of techniques. Nucleic acid from any nucleated cell can be used as the starting point for such assay techniques, and may be isolated according to standard nucleic acid preparation procedures which are well known to those of skill in the art.

[0126] DNA may be used in hybridization or amplification assays of biological samples to detect abnormalities involving gene structure, including point mutations, insertions, deletions and chromosomal rearrangements. Such assays may include, but are not limited to, Southern analyses, single stranded conformational polymorphism analyses (SSCP), and PCR analyses.

[0127] Such diagnostic methods for the detection of gene-specific mutations can involve for example, contacting and incubating nucleic acids including recombinant DNA molecules, cloned genes or degenerate variants thereof, obtained from a sample, e.g., derived from a patient sample or other appropriate cellular source, with one or more labeled nucleic acid reagents including recombinant DNA molecules, cloned genes or degenerate variants thereof, as described above, under conditions favorable for the specific annealing of these reagents to their complementary sequences within the gene of interest of the current invention. Preferably, the lengths of these nucleic acid reagents are at least 15 to 30 nucleotides. After incubation, all non-annealed nucleic acids are removed from the nucleic acid molecule hybrid. The presence of nucleic acids which have hybridized, if any such molecules exist, is then detected. Using such a detection scheme, the nucleic acid from the cell type or tissue of interest can be immobilized, for example, to a solid support such as a membrane, or a plastic surface such as that on a microtiter plate or polystyrene beads. In this case, after incubation, non-annealed, labeled nucleic acid reagents of the type described above are easily removed. Detection of the remaining, annealed, labeled nucleic acid reagents is accomplished using standard techniques well-known to those in the art. The gene sequences to which the nucleic acid reagents have annealed can be compared to the annealing pattern expected from a normal gene sequence in order to determine whether a gene mutation is present.

[0128] Alternative diagnostic methods for the detection of gene specific nucleic acid molecules, in patient samples or other appropriate cell sources, may involve their amplification, e.g., by PCR (the experimental embodiment set forth in Mullis, K. B., 1987, U.S. Pat. No. 4,683,202), followed by the detection of the amplified molecules using techniques well known to those of skill in the art. The resulting amplified sequences can be compared to those which would be expected if the nucleic acid being amplified contained only normal copies of the respective gene in order to determine whether a gene mutation exists.

[0129] Additionally, well-known genotyping techniques can be performed to identify individuals carrying mutations in any of the genes of the current invention. Such techniques include, for example, the use of restriction fragment length polymorphisms (RFLPs), which involve sequence variations in one of the recognition sites for the specific restriction enzyme used.

[0130] Furthermore, the polynucleotide sequences of the current invention may be mapped to chromosomes and specific regions of chromosomes using well known genetic and/or chromosomal mapping techniques. These techniques include in situ hybridization, linkage analysis against known chromosomal markers, hybridization screening with libraries or flow-sorted chromosomal preparations specific to known chromosomes, and the like. The technique of fluorescent in situ hybridization of chromosome spreads has been described, for example, in Verma et al. (1988) Human Chromosomes: Manual of Basic Techniques, Pergamon Press, New York. Fluorescent in situ hybridization of chromosomal preparations and other physical chromosome mapping techniques may be correlated with additional genetic map data. Examples of genetic map data can be found, for example, in Genetic Maps: Locus Maps of Complex Genomes, Book 5: Human Maps, O'Brien, editor, Cold Spring Harbor Laboratory Press (1990). Comparisons of physical chromosomal map data may be of particular interest in detecting genetic diseases in carrier states.

[0131] The level of expression of genes can also be assayed by detecting and measuring the transcription of such genes. For example, RNA from a cell type or tissue known, or suspected to express any of the genes of the current invention can be isolated and tested utilizing hybridization or PCR techniques (e.g., northern or RT PCR) such as those described, above. Such analyses may reveal both quantitative and qualitative aspects of the expression pattern of the respective gene, including activation or inactivation of gene expression. In situ hybridization using suitable radioactive labels, enzymatic labels, or chemically tagged forms of the described polynucleotide sequences can also be used to assess expression patterns in vivo.

[0132] Additionally, an oligonucleotide or polynucleotide sequence first disclosed in at least a portion of at least one of the GTS sequences of SEQ ID NOS:9-1,008 can be used as a hybridization probe in conjunction with a solid support matrix/substrate (resins, beads, membranes, plastics, polymers, metal or metallized substrates, crystalline or polycrystalline substrates, etc.). Of particular note are spatially addressable arrays (i.e., gene chips, microtiter plates, etc.) of oligonucleotides and polynucleotides, or corresponding oligopeptides and polypeptides, wherein at least one of the biopolymers present on the spatially addressable array comprises an oligonucleotide or polynucleotide sequence first disclosed in at least one of the GTS sequences of SEQ ID NOS:9-1,008, or an amino acid sequence encoded thereby. Methods for attaching biopolymers to, or synthesizing biopolymers on, solid support matrices, and conducting binding studies thereon are disclosed in, inter alia, U.S. Pat. Nos. 5,556,752, 5,744,305, 4,631,211, 5,445,934, 5,252,743, 4,713,326, 5,424,186, and 4,689,405 the disclosures of which are herein incorporated by reference in their entirety. For example, a series of such GTS oligonucleotide sequences, or the complements thereof, can be used to represent all or a portion of the described GTS sequences. The oligonucleotides, typically between about 16 to about 40 (or any whole number within the stated range) nucleotides in length, may partially overlap each other and/or the GTS may be represented using oligonucleotides that do not overlap. Accordingly, the described GTSs shall typically comprise at least about two or three distinct oligonucleotide sequences of at least about 18, and preferably about 25, nucleotides in length that are first disclosed in the described Sequence Listing. Such oligonucleotide sequences may begin at any nucleotide present within a sequence in the Sequence Listing and proceed in either a sense (5′-to-3′) orientation vis-a-vis the described sequence or in an antisense orientation.

[0133] Although the presently described GTSs have been specifically described using nucleotide sequence, it should be appreciated that each of the GTSs can uniquely be described using any of a wide variety of additional structural attributes, or combinations thereof. For example, a given GTS can be described by the net composition of the nucleotides present within a given region of the GTS in conjunction with the presence of one or more specific oligonucleotide sequence(s) first disclosed in the GTS. Alternatively, a restriction map specifying the relative positions of restriction endonuclease digestion sites, or various palindromic or other specific oligonucleotide sequences can be used to structurally describe a given GTS. Such restriction maps, which are typically generated by widely available computer programs (e.g., the University of Wisconsin GCG sequence analysis package, SEQUENCHER 3.0, Gene Codes Corp., Ann Arbor, Mich., etc.), can optionally be used in conjunction with one or more discrete nucleotide sequence(s) present in the GTS that can be described by the relative position of the sequence relative to one or more additional sequence(s) or one or more restriction sites present in the GTS.

[0134] 5.5.2 Detection of the Gene Products of the Current Invention

[0135] Antibodies directed against wild type or mutant gene products of the current invention or conserved variants or peptide fragments thereof, which are discussed above in Section 5.4 may also be used as diagnostics and prognostics for disorders affecting development and cellular differentiation, as described herein. Such diagnostic methods, may be used to detect abnormalities in the level of gene expression, or abnormalities in the structure and/or temporal, tissue, cellular, or subcellular location of the respective gene product, and may be performed in vivo or in vitro, such as, for example, on biopsy tissue.

[0136] The tissue or cell type to be analyzed will generally include those which are known, or suspected, to contain cells that express the respective gene. The protein isolation methods employed herein may, for example, be such as those described in Harlow and Lane (Harlow, E. and Lane, D., 1988, “Antibodies: A Laboratory Manual”, Cold Spring Harbor Laboratory Press, Cold Spring Harbor, N.Y.), which is incorporated herein by reference in its entirety. The isolated cells can be derived from cell culture or from a patient. The analysis of cells taken from culture may be a necessary step in the assessment of cells that could be used as part of a cell-based gene therapy technique or, alternatively, to test the effect of compounds on the expression of the respective gene.

[0137] For example, antibodies, or fragments of antibodies, such as those described above in Section 5.4 are also useful in the present invention to quantitatively or qualitatively detect the presence of gene products of the current invention or conserved variants or peptide fragments thereof. This can be accomplished, for example, by immunofluorescence techniques employing a fluorescently labeled antibody (see below, this Section) coupled with light microscopic, flow cytometric, or fluorimetric detection.

[0138] The antibodies (or fragments thereof) or fusion or conjugated proteins useful in the present invention may, additionally, be employed histologically, as in immunofluorescence, immunoelectron microscopy or non-immuno assays, for in situ detection of gene products of the current invention or conserved variants or peptide fragments thereof, or for catalytic subunit binding (in the case of labeled catalytic subunit fusion protein).

[0139] In situ detection may be accomplished by removing a histological specimen from a patient, and applying thereto a labeled antibody or fusion protein of the present invention. The antibody (or fragment) or fusion protein is preferably applied by overlaying the labeled antibody (or fragment) onto a biological sample. Through the use of such a procedure, it is possible to determine not only the presence of the gene product of the current invention, or conserved variants or peptide fragments, but also its distribution in the examined tissue. Using the present invention, those of ordinary skill will readily perceive that any of a wide variety of histological methods (such as staining procedures) can be modified in order to achieve such in situ detection.

[0140] Immunoassays and non-immunoassays for gene products of the current invention or conserved variants or peptide fragments thereof will typically comprise incubating a sample, such as a biological fluid, a tissue extract, freshly harvested cells, or lysates of cells which have been incubated in cell culture, in the presence of a detectably labeled antibody capable of identifying the respective gene products of interest or conserved variants or peptide fragments thereof, and detecting the bound antibody by any of a number of techniques well-known in the art.

[0141] The biological sample may be brought in contact with and immobilized onto a solid phase support or carrier such as nitrocellulose, or other solid support which is capable of immobilizing cells, cell particles or soluble proteins. The support may then be washed with suitable buffers followed by treatment with the detectably labeled antibody specific to the peptide or protein of interest of the current invention or with fusion protein. The solid phase support may then be washed with the buffer a second time to remove unbound antibody or fusion protein. The amount of bound label on solid support may then be detected by conventional means.

[0142] “Solid phase support or carrier” is intended to encompass any support capable of binding an antigen or an antibody. Well-known supports or carriers include glass, polystyrene, polypropylene, polyethylene, dextran, nylon, amylases, natural and modified celluloses, polyacrylamides, gabbros, and magnetite. The nature of the carrier can be either soluble to some extent or insoluble for the purposes of the present invention. The support material may have virtually any possible structural configuration so long as the coupled molecule is capable of binding to an antigen or antibody. Thus, the support configuration may be spherical, as in a bead, or cylindrical, as in the inside surface of a test tube, or the external surface of a rod. Alternatively, the surface may be flat such as a sheet, test strip, etc. Preferred supports include polystyrene beads. Those skilled in the art will know many other suitable carriers for binding antibody or antigen, or will be able to ascertain the same by use of routine experimentation.

[0143] The binding activity of a given lot of antibody or fusion protein may be determined according to well known methods. Those skilled in the art will be able to determine operative and optimal assay conditions for each determination by employing routine experimentation.

[0144] With respect to antibodies, one of the ways in which the antibody can be detectably labeled is by linking the same to an enzyme and use in an enzyme immunoassay (EIA) (Voller, “The Enzyme Linked Immunosorbent Assay (ELISA)”, 1978, Diagnostic Horizons 2:1-7, Microbiological Associates Quarterly Publication, Walkersville, Md.); Voller et al., 1978, J. Clin. Pathol. 31:507-520; Butler, 1981, Meth. Enzymol. 73:482-523; Maggio (ed.), 1980, Enzyme Immunoassay, CRC Press, Boca Raton, Fla.; Ishikawa et al., (eds.), 1981, Enzyme Immunoassay, Kgaku Shoin, Tokyo). The enzyme which is bound to the antibody will react with an appropriate substrate, preferably a chromogenic substrate, in such a manner as to produce a chemical moiety which can be detected, for example, by spectrophotometric, fluorimetric or by visual means. Enzymes which can be used to detectably label the antibody include, but are not limited to, malate dehydrogenase, staphylococcal nuclease, delta-5-steroid isomerase, yeast alcohol dehydrogenase, alpha-glycerophosphate, dehydrogenase, triose phosphate isomerase, horseradish peroxidase, alkaline phosphatase, asparaginase, glucose oxidase, beta-galactosidase, ribonuclease, urease, catalase, glucose-6-phosphate dehydrogenase, glucoamylase and acetylcholinesterase. The detection can be accomplished by calorimetric methods which employ a chromogenic substrate for the enzyme. Detection may also be accomplished by visual comparison of the extent of enzymatic reaction of a substrate in comparison with similarly prepared standards.

[0145] Detection may also be accomplished using any of a variety of other immunoassays. For example, by radioactively labeling the antibodies or antibody fragments, it is possible to detect the peptide or protein of interest through the use of a radioimmunoassay (RIA) (see, for example, Weintraub, B., Principles of Radioimmunoassays, Seventh Training Course on Radioligand Assay Techniques, The Endocrine Society, March, 1986, which is incorporated by reference herein). The radioactive isotope can be detected by such means as the use of a gamma counter or a scintillation counter or by autoradiography.

[0146] It is also possible to label the antibody with a fluorescent compound. When the fluorescently labeled antibody is exposed to light of the proper wave length, its presence can then be detected due to fluorescence. Among the most commonly used fluorescent labeling compounds are fluorescein isothiocyanate, rhodamine, phycoerythrin, phycocyanin, allophycocyanin and fluorescamine.

[0147] The antibody can also be detectably labeled using fluorescence emitting metals such as ¹⁵²Eu, or others of the lanthanide series. These metals can be attached to the antibody using such metal chelating groups as diethylenetriaminepentacetic acid (DTPA) or ethylenediaminetetraacetic acid (EDTA).

[0148] The antibody also can be detectably labeled by coupling it to a chemiluminescent compound. The presence of the chemiluminescent-tagged antibody is then determined by detecting the presence of luminescence that arises during the course of a chemical reaction. Examples of particularly useful chemiluminescent labeling compounds are luminol, isoluminol, theromatic acridinium ester, imidazole, acridinium salt and oxalate ester.

[0149] Likewise, a bioluminescent compound may be used to label the antibody of the present invention. Bioluminescence is a type of chemiluminescence found in biological systems in, which a catalytic protein increases the efficiency of the chemiluminescent reaction. The presence of a bioluminescent protein is determined by detecting the presence of luminescence. Important bioluminescent compounds for labeling purposes include, but are not limited to, luciferin, luciferase and aequorin.

[0150] An additional use of a peptide or polypeptide encoded by an oligonucleotide or polynucleotide sequence first disclosed in at least one of the GTS sequences of SEQ ID NOS:9-1,008 is by incorporating the sequence into a phage display, or other peptide library/binding, system that can be used to screen for proteins, or other ligands, that are capable of binding to an amino acid sequence encoded by an oligonucleotide or polynucleotide sequence first disclosed in at least one of the GTS sequences of SEQ ID NOS:9-1,008 (see U.S. Pat. Nos. 5,270,170, and 5,432,018, herein incorporated by reference in their entirety). Moreover, peptide arrays comprising a novel amino acid sequence corresponding to a portion of at least one of the polynucleotide sequences first disclosed in SEQ ID NOS:9-1,008 can be generated and screened essentially as described in U.S. Pat. Nos. 5,143,854, 5,405,783, and 5,252,743, the complete disclosures of which are herein incorporated by references.

[0151] Additionally, the presently described GTSs, or primers derived therefrom, can be used to screen spatially addressable arrays, or pools therefrom, of clones present in a full-length human cDNA library. The 96 well microtiter plate format is especially well suited to the screening, by PCR for example, of pooled subfractions of cDNA clones.

[0152] 5.6 Screening Assays for Compounds That Modulate the Expression or Activity of Peptides and Proteins of the Current Invention

[0153] The following assays are designed to identify compounds that interact with (e.g., bind to) peptides and proteins at least partially encoded by one of SEQ ID NOS:9-1,008 (i.e. peptides or proteins of the current invention) compounds that interact with (e.g., bind to) intracellular proteins that interact with peptides and proteins of the current invention, compounds that interfere with the interaction of peptides and proteins of the current invention with each other and with other intracellular proteins involved in developmental and cell differentiation processes, and to compounds which modulate the activity of genes of the current invention (i.e., modulate the level of expression of genes of the current invention) or modulate the level of gene products of the current invention. Assays may additionally be utilized which identify compounds which bind to gene regulatory sequences (e.g., promoter sequences) and which may modulate the expression of genes of the current invention. See e.g., Platt, K. A., 1994, J. Biol. Chem. 269:28558-28562, which is incorporated herein by reference in its entirety.

[0154] Compounds that can be screened in accordance with the invention include, but are not limited to, peptides, antibodies and fragments thereof, prostaglandins, lipids and other organic compounds (e.g., terpines, peptidomimetics) that bind to the peptide or protein of interest of the current invention and either mimic the activity triggered by the natural ligand (i.e., agonists) or inhibit the activity triggered by the natural ligand (i.e., antagonists); as well as peptides, antibodies or fragments thereof, and other organic compounds that mimic the peptide or protein of interest of the current invention (or a portion thereof) and bind to and “neutralize” natural ligand.

[0155] Such compounds may include, but are not limited to, peptides such as, for example, soluble peptides, including, but are not limited to, members of random peptide libraries (see, e.g., Lam, K. S. et al., 1991, Nature 354:82-84; Houghten, R. et al., 1991, Nature 354:84-86), and combinatorial chemistry-derived molecular library peptides made of D- and/or L-configuration amino acids, phosphopeptides (including, but not limited to members of random or partially degenerate, directed phosphopeptide libraries; see, e.g., Songyang, Z. et al., 1993, Cell 72:767-778); antibodies (including, but not limited to, polyclonal, monoclonal, humanized, anti-idiotypic, chimeric or single chain antibodies, and Fab, F(ab′)₂ and Fab expression library fragments, and epitope-binding fragments thereof); and small organic or inorganic molecules.

[0156] Other compounds that can be screened in accordance with the invention include, but are not limited to, small organic molecules that are able to gain entry into an appropriate cell (e.g., in ES cells) and affect the expression of a gene of the current invention or some other gene involved in development and cell differentiation (e.g., by interacting with the regulatory region or transcription factors involved in gene expression); or such compounds that affect the activity of the peptide or protein of interest of the current invention, e.g., by inhibiting or enhancing the binding of such peptide or protein to another cellular peptide or protein, or other factor, necessary for catalysis, signal transduction, or the like, that is involved in developmental or cell differentiation processes.

[0157] Computer modeling and searching technologies permit the identification of compounds, or the improvement of already identified compounds, that can modulate the expression or activity of peptides or proteins of interest of the current invention. Having identified such a compound or composition, the active sites or regions are identified. Such active sites might typically be the binding partner sites, such as, for example, the interaction domains of the peptides and proteins of the current invention with their respective binding partners. The active site can be identified using methods known in the art including, for example, from study of the amino acid sequences of peptides, from the nucleotide sequences of nucleic acids, or from study of complexes of the relevant compound or composition with its natural ligand. In the latter case, chemical or X-ray crystallographic methods can be used to find the active site by finding where on the factor the complexed ligand is found.

[0158] Next, the three dimensional geometric structure of the active site is determined. This can be done by known methods, including X-ray crystallography, which can determine a complete molecular structure. On the other hand, solid or liquid phase NMR can be used to determine certain intra-molecular distances. Any other experimental method of structure determination can be used to obtain partial or complete geometric structures. The geometric structures may be measured with a complexed ligand, natural or artificial, which may increase the accuracy of the active site structure determined.

[0159] If an incomplete or insufficiently accurate structure is determined, the methods of computer based numerical modeling can be used to complete the structure or improve its accuracy. Any recognized modeling method may be used, including parameterized models specific to particular biopolymers such as proteins or nucleic acids, molecular dynamics models based on computing molecular motions, statistical mechanics models based on thermal ensembles, or combined models. For most types of models, standard molecular force fields, representing the forces between constituent atoms and groups, are necessary, and can be selected from force fields known in physical chemistry. The incomplete or less accurate experimental structures can serve as constraints on the complete and more accurate structures computed by these modeling methods.

[0160] Finally, having determined the structure of the active site, either experimentally, by modeling, or by a combination, candidate modulating compounds can be identified by searching databases containing compounds along with information on their molecular structure. Such a search seeks compounds having structures that match the determined active site structure and that interact with the groups defining the active site. Such a search can be manual, but is preferably computer assisted. These compounds found from this search are potential modulating compounds of the peptides and proteins of interest of the current invention.

[0161] Alternatively, these methods can be used to identify improved modulating compounds from an already known modulating compound or ligand. The composition of the known compound can be modified and the structural effects of modification can be determined using the experimental and computer modeling methods described above applied to the new composition. The altered structure is then compared to the active site structure of the compound to determine if an improved fit or interaction results. In this manner systematic variations in composition, such as by varying side groups, can be quickly evaluated to obtain modified modulating compounds or ligands of improved specificity or activity.

[0162] Further experimental and computer modeling methods useful to identify modulating compounds based upon identification of the active sites of peptides and proteins of interest of the current invention, and related factors involved in development, cellular differentiation, and other cellular processes will be apparent to those of skill in the art.

[0163] Examples of molecular modeling systems are the CHARM and QUANTA programs (Polygon Corporation, Waltham, Mass.). CHARM performs the energy minimization and molecular dynamics functions. QUANTA performs the construction, graphic modeling and analysis of molecular structure. QUANTA allows interactive construction, modification, visualization, and analysis of the behavior of molecules with each other.

[0164] A number of articles review computer modeling of drugs interactive with specific proteins, such as Rotivinen et al., 1988, Acta Pharmaceutical Fennica 97:159-166; Ripka, New Scientist 54-57 (June 16, 1988); McKinaly and Rossmann, 1989, Annu. Rev. Pharmacol. Toxicol. 29:111-122; Perry and Davies, OSAR: Quantitative Structure-Activity Relationships in Drug Design pp. 189-193 (Alan R. Liss, Inc. 1989); Lewis and Dean, 1989, Proc. R. Soc. Lond. 236:125-140 and 141-162; and, with respect to a model receptor for nucleic acid components, Askew et al., 1989, J. Am. Chem. Soc. 111:1082-1090. Other computer programs that screen and graphically depict chemicals are available from companies such as BioDesign, Inc. (Pasadena, Calif.), Allelix, Inc. (Mississauga, Ontario, Canada), and Hypercube, Inc. (Cambridge, Ontario). Although these are primarily designed for application to drugs specific to particular proteins, they can be adapted to the design of drugs specific to regions of DNA or RNA, once that region is identified.

[0165] Although described above with reference to design and generation of compounds which could alter binding, one could also screen libraries of known compounds, including natural products or synthetic chemicals, and biologically active materials, including proteins, for compounds which are inhibitors or activators.

[0166] Compounds identified via assays such as those described herein may be useful, for example, in elaborating the biological function of the gene products of interest of the current invention, and for ameliorating disorders affecting development and cell differentiation. Assays for testing the effectiveness of compounds, identified by, for example, techniques such as those described below.

[0167] 5.6.1 In vitro Screening Assays for Compounds That Bind to Peptides and Proteins of the Current Invention

[0168] In vitro systems may be designed to identify compounds capable of interacting with (e.g., binding to) peptides and proteins of interest of the current invention, fragments thereof, and variants thereof. The identified compounds can be useful, for example, in modulating the activity of wild type and/or mutant gene products of the current invention; may be utilized in screens for identifying compounds that disrupt normal interactions of the peptides and proteins of the current invention with other factors, like, for example, other peptides and proteins; or may in themselves disrupt such interactions.

[0169] The principle of the assays used to identify compounds that bind to the peptides and proteins of the current invention involves preparing a reaction mixture of the peptides and proteins of interest that are disclosed by the current invention and a test compound under conditions and for a time sufficient to allow the two components to interact and bind, thus forming a complex that can be removed from and/or detected in the reaction mixture. The peptides and proteins of the current invention used can vary depending upon the goal of the screening assay. For example, where agonists of the natural ligand are sought, the full length peptide or protein of interest, or a fusion protein containing the subunit of interest fused to a protein or polypeptide that affords advantages in the assay system (e.g., labeling, isolation of the resulting complex, etc.) can be utilized.

[0170] The screening assays can be conducted in a variety of ways. For example, one method of conducting such an assay involves anchoring the peptide or protein of interest, or a fragment or fusion protein thereof, or the test substance onto a solid phase and detecting peptide or protein of interest/test compound complexes anchored on the solid phase at the end of the reaction. In one embodiment of such a method, the peptide or protein of interest may be anchored onto a solid surface, and the test compound, which is not anchored, may be labeled, either directly or indirectly. In another embodiment of the method, a peptide or protein of interest of the current invention anchored on the solid phase is complexed with a natural ligand of such peptide or protein of interest. Then, a test compound could be assayed for its ability to disrupt the association of the complex.

[0171] In practice, microtiter plates may conveniently be utilized as the solid phase. The anchored component may be immobilized by non-covalent or covalent attachments. Non-covalent attachment may be accomplished by simply coating the solid surface with a solution of the protein and drying. Alternatively, an immobilized antibody, preferably a monoclonal antibody, specific for the peptide or protein to be immobilized may be used to anchor the peptide or protein to the solid surface. The surfaces may be prepared in advance and stored.

[0172] In order to conduct the assay, the nonimmobilized component is added to the coated surface containing the anchored component. After the reaction is complete, unreacted components are removed (e.g., by washing) under conditions such that any complexes formed will remain immobilized on the solid surface. The detection of complexes anchored on the solid surface can be accomplished in a number of ways. Where the previously nonimmobilized component is pre-labeled, the detection of label immobilized on the surface indicates that complexes were formed. Where the previously nonimmobilized component is not pre-labeled, an indirect label can be used to detect complexes anchored on the surface; e.g., using a labeled antibody specific for the previously nonimmobilized component (the antibody, in turn, may be directly labeled or indirectly labeled with a labeled anti-Ig antibody).

[0173] Alternatively, a reaction can be conducted in a liquid phase, the reaction products separated from unreacted components, and complexes detected; e.g., using an immobilized antibody specific for one component of complexes formed, like, for example, the peptide or protein of interest of the current invention or the test compound to anchor any complexes formed in solution, and a labeled antibody specific for the other component of the possible complex to detect anchored complexes.

[0174] 5.6.2 Assays for Intracellular Proteins That Interact with the Peptides and Proteins of the Current Invention

[0175] Any method suitable for detecting protein-protein interactions may be employed for identifying intracellular peptides and proteins that interact with peptides and proteins of the current invention. Among the traditional methods which may be employed are co-immunoprecipitation, crosslinking and co-purification through gradients or chromatographic columns of cell lysates or proteins obtained from cell lysates and the peptides and proteins of the current invention to identify proteins in the lysate that interact with those peptides and proteins of the current invention. For these assays, the peptides and proteins of the current invention may be used in full length, or in truncated or modified forms or as fusion-proteins. Similarly, the component may be a complex of two or more of the peptides and proteins of the current invention. Once isolated, such an intracellular protein can be identified and can, in turn, be used in conjunction with standard techniques to identify proteins with which it interacts. For example, at least a portion of the amino acid sequence of an intracellular protein which interacts with a peptide or protein of the current invention, can be ascertained using techniques well known to those of skill in the art, such as via the Edman degradation technique. (See, e.g., Creighton, 1983, “Proteins: Structures and Molecular Principles”, W.H. Freeman & Co., N.Y., pp.34-49). The amino acid sequence obtained may be used as a guide for the generation of oligonucleotide mixtures that can be used to screen for gene sequences encoding such intracellular proteins. Screening may be accomplished, for example, by standard hybridization or PCR techniques. Techniques for the generation of oligonucleotide mixtures and the screening are well-known. (See, e.g., Ausubel, supra., and PCR Protocols: A Guide to Methods and Applications, 1990, Innis, M. et al., eds. Academic Press, Inc., New York).

[0176] Additionally, methods may be employed which result in the simultaneous identification of genes which encode the intracellular proteins interacting with peptides and proteins of the current invention. These methods include, for example, probing expression libraries, in a manner similar to the well known technique of antibody probing of ëgt11 libraries, using a labeled form of a peptide or protein of the current invention, or a fusion protein, e.g., a peptide or protein at least partially encoded by a GTS of the present invention fused to a marker (e.g., an enzyme, fluor, luminescent protein, or dye), or an Ig-Fc domain.

[0177] One method that detects protein interactions in vivo, the two-hybrid system, is described in detail for illustration only and not by way of limitation. One version of this system has been described (Chien et al., 1991, Proc. Natl. Acad. Sci. USA, 88:9578-9582) and is commercially available from Clontech (Palo Alto, Calif.).

[0178] Briefly, utilizing such a system, plasmids are constructed that encode two hybrid proteins: one plasmid consists of nucleotides encoding the DNA-binding domain of a transcription activator protein fused to a nucleotide sequence of the current invention encoding a peptide or protein of the current invention, a modified or truncated form or a fusion protein, and the other plasmid consists of nucleotides encoding the transcription activator protein's activation domain fused to a cDNA encoding an unknown protein which has been recombined into this plasmid as part of a cDNA library. The DNA-binding domain fusion plasmid and the cDNA library are transformed into a strain of the yeast Saccharomyces cerevisiae that contains a reporter gene (e.g., HBS or lacZ) whose regulatory region contains the transcription activator's binding site. Either hybrid protein alone cannot activate transcription of the reporter gene; the DNA-binding domain hybrid cannot because it does not provide activation function, and the activation domain hybrid cannot because it cannot localize to the activator's binding sites. Interaction of the two hybrid proteins reconstitutes the functional activator protein and results in expression of the reporter gene, which is detected by an assay for the reporter gene product.

[0179] The two-hybrid system or related methodology may be used to screen activation domain libraries for proteins that interact with the “bait” gene product. By way of example, and not by way of limitation, a peptide or protein of the current invention may be used as the bait gene product. Total genomic or cDNA sequences are fused to the DNA encoding an activation domain. This library and a plasmid encoding a hybrid of a bait gene product of the current invention fused to the DNA-binding domain are cotransformed into a yeast reporter strain, and the resulting transformants are screened for those that express the reporter gene. For example, and not by way of limitation, a bait gene sequence of the current invention can be cloned into a vector such that it is translationally fused to the DNA encoding the DNA-binding domain of the GAL4 protein. These colonies are purified and the library plasmids responsible for reporter gene expression are isolated. DNA sequencing is then used to identify the proteins encoded by the library plasmids.

[0180] A cDNA library of the cell line from which proteins that interact with bait gene product of the current invention are to be detected can be made using methods routinely practiced in the art. According to the particular system described herein, for example, the cDNA fragments can be inserted into a vector such that they are translationally fused to the transcriptional activation domain of GAL4. This library can be co-transfected along with the bait gene-GAL4 fusion plasmid into a yeast strain which contains a lacZ gene driven by a promoter which contains GAL4 activation sequence. A cDNA encoded protein, fused to GAL4 transcriptional activation domain, that interacts with bait gene product will reconstitute an active GAL4 protein and thereby drive expression of the HIS3 gene. Colonies which express HIS3 can be detected by their growth on petri dishes containing semi-solid agar based media lacking histidine. The cDNA can then be purified from these strains, and used to produce and isolate the bait gene-interacting protein using techniques routinely practiced in the art.

[0181] 5.6.3 Assays for Compounds That Interfere with Interactions of the Peptides and Proteins of the Current Invention with Intracellular Macromolecules

[0182] The macromolecules that interact with the peptides and proteins of the current invention are referred to, for purposes of this discussion, as “binding partners”. These binding partners are likely to be involved in catalytic reactions or signal transduction pathways, and therefore, in the role of the peptides and proteins of the current invention in development and cell differentiation. It is also desirable to identify compounds that interfere with or disrupt the interaction of such binding partners with the peptides and proteins of the current invention which may be useful in regulating the activity of the peptides and proteins of the current invention and thus control development and cell differentiation disorders associated with the activity of the peptides and proteins of the current invention.

[0183] The basic principle of the assay systems used to identify compounds that interfere with the interaction between the peptides and proteins of the current invention and its binding partner or partners involves preparing a reaction mixture containing the peptides or proteins of the current invention of interest, modified or truncated version thereof, or fusion proteins thereof as described above, and the binding partner under conditions and for a time sufficient to allow the two to interact and bind, thus forming a complex. In order to test a compound for inhibitory activity, the reaction mixture is prepared in the presence and absence of the test compound. The test compound may be initially included in the reaction mixture, or may be added at a time subsequent to the addition of the peptide or protein of the current invention and its binding partner. Control reaction mixtures are incubated without the test compound or with a placebo. The formation of any complexes between the peptide or protein of the current invention and the binding partner is then detected. The formation of a complex in the control reaction, but not in the reaction mixture containing the test compound, indicates that the compound interferes with the interaction of the peptide or protein at least partially encoded by a GTS of the present invention and the interactive binding partner. Additionally, complex formation within reaction mixtures containing the test compound and normal peptide or protein of the current invention may also be compared to complex formation within reaction mixtures containing the test compound and a mutant peptide or protein of the current invention. This comparison can be important in those cases wherein it is desirable to identify compounds that disrupt interactions of mutant but not normal forms of a peptide or protein of the current invention.

[0184] The assay for compounds that interfere with the interaction of a peptide or protein of the current invention and binding partners can be conducted in a heterogeneous or homogeneous format. Heterogeneous assays involve anchoring either the peptide or protein of the current invention or the binding partner onto a solid phase and detecting complexes anchored on the solid phase at the end of the reaction. In homogeneous assays, the entire reaction is carried out in a liquid phase. In either approach, the order of addition of reactants can be varied to obtain different information about the compounds being tested. For example, test compounds that interfere with the interaction by competition can be identified by conducting the reaction in the presence of the test substance; i.e., by adding the test substance to the reaction mixture prior to or simultaneously with the peptide or protein of the current invention and interactive binding partner. Alternatively, test compounds that disrupt preformed complexes, e.g. compounds with higher binding constants that displace one of the components from the complex, can be tested by adding the test compound to the reaction mixture after complexes have been formed. The various formats are described briefly below.

[0185] In a heterogeneous assay system, either the peptide or protein of the current invention or the interactive binding partner, is anchored onto a solid surface, while the non-anchored species is labeled either directly or indirectly. In practice, microtiter plates are conveniently utilized. The anchored species may be immobilized by non-covalent or covalent attachments. Non-covalent attachment may be accomplished simply by coating the solid surface with a solution of the peptide or protein of the current invention or binding partner and drying. Alternatively, an immobilized antibody specific for the species to be anchored may be used to anchor the species to the solid surface. The surfaces may be prepared in advance and stored.

[0186] In order to conduct the assay, the partner of the immobilized species is exposed to the coated surface with or without the test compound. After the reaction is complete, unreacted components are removed (e.g., by washing) and any complexes formed will remain immobilized on the solid surface. The detection of complexes anchored on the solid surface can be accomplished in a number of ways. Where the non-immobilized species is pre-labeled, the detection of label immobilized on the surface indicates that complexes were formed. Where the non-immobilized species is not pre-labeled, an indirect label can be used to detect complexes anchored on the surface; e.g., using a labeled antibody specific for the initially non-immobilized species (the antibody, in turn, may be directly labeled or indirectly labeled with a labeled anti-Ig antibody). Depending upon the order of addition of reaction components, test compounds which inhibit complex formation or which disrupt preformed complexes can be detected.

[0187] Alternatively, the reaction can be conducted in a liquid phase in the presence or absence of the test compound, the reaction products separated from unreacted components, and complexes detected; e.g., using an immobilized antibody specific for one of the binding components to anchor any complexes formed in solution, and a labeled antibody specific for the other partner to detect anchored complexes. Again, depending upon the order of addition of reactants to the liquid phase, test compounds which inhibit complex or which disrupt preformed complexes can be identified.

[0188] In an alternate embodiment of the invention, a homogeneous assay can be used. In this approach, a preformed complex of the peptide or protein of the current invention and the interactive binding partner is prepared in which either the peptide or protein of the current invention or its binding partner is labeled, but the signal generated by the label is quenched due to formation of the complex (see, e.g., U.S. Pat. No. 4,190,496 by Rubenstein which utilizes this approach for immunoassays). The addition of a test substance that competes with and displaces one of the species from the preformed complex will result in the generation of a signal above background. In this way, test substances which disrupt peptide or protein of the current invention/intracellular binding partner interaction can be identified.

[0189] In a particular embodiment, a peptide or protein of the current invention can be prepared for immobilization. For example, the peptide or protein of the current invention or a fragment thereof can be fused to a glutathione-S-transferase (GST) gene using a fusion vector, such as pGEX-5×-1, in such a manner that its binding activity is maintained in the resulting fusion protein. The interactive binding partner can be purified and used to raise a monoclonal antibody, using methods routinely practiced in the art and described above. This antibody can be labeled with the radioactive isotope ¹²⁵I, for example, by methods routinely practiced in the art. In a heterogeneous assay, e.g., the GST-peptide or protein of the current invention fusion protein can be anchored to glutathione-agarose beads. The interactive binding partner can then be added in the presence or absence of the test compound in a manner that allows interaction and binding to occur. At the end of the reaction period, unbound material can be washed away, and the labeled monoclonal antibody can be added to the system and allowed to bind to the complexed components. The interaction between the peptide or protein of the current invention and the interactive binding partner can be detected by measuring the amount of radioactivity that remains associated with the glutathione-agarose beads. A successful inhibition of the interaction by the test compound will result in a decrease in measured radioactivity.

[0190] Alternatively, the GST-peptide or protein of the current invention fusion protein and the interactive binding partner can be mixed together in liquid in the absence of the solid glutathione-agarose beads. The test compound can be added either during or after the species are allowed to interact. This mixture can then be added to the glutathione-agarose beads and unbound material is washed away. Again the extent of inhibition of the peptide or protein of the current invention/binding partner interaction can be detected by adding the labeled antibody and measuring the radioactivity associated with the beads.

[0191] In another embodiment of the invention, these same techniques can be employed using peptide fragments that correspond to the binding domains of a peptide or protein of the current invention and/or the interactive or binding partner (in cases where the binding partner is a protein) in place of one or both of the full length proteins. Any number of methods routinely practiced in the art can be used to identify and isolate the binding sites. These methods include, but are not limited to, mutagenesis of the gene encoding one of the proteins and screening for disruption of binding in a co-immunoprecipitation assay. Compensating mutations in the gene encoding the second species in the complex can then be selected. Sequence analysis of the genes encoding the respective proteins will reveal the mutations that correspond to the region of the protein involved in interactive binding. Alternatively, one protein can be anchored to a solid surface using methods described above, and allowed to interact with and bind to its labeled binding partner, which has been treated with a proteolytic enzyme, such as trypsin. After washing, a short, labeled peptide comprising the binding domain may remain associated with the solid material, which can be isolated and identified by amino acid sequencing. Also, once the gene coding for the intracellular binding partner is obtained, short gene segments can be engineered to express peptide fragments of the protein, which can then be tested for binding activity and purified or synthesized.

[0192] For example, and not by way of limitation, a peptide or protein of the current invention can be anchored to a solid material as described, above, by making a GST-peptide or protein of the current invention fusion protein and allowing it to bind to glutathione agarose beads. The interactive binding partner can be labeled with a radioactive isotope, such as ³⁵S, and cleaved with a proteolytic enzyme such as trypsin. Cleavage products can then be added to the anchored GST-peptide or protein of the current invention fusion protein and allowed to bind. After washing away unbound peptides, labeled bound material, representing the intracellular binding partner binding domain, can be eluted, purified, and analyzed for amino acid sequence by well-known methods. Peptides so identified can be produced synthetically or fused to appropriate facilitative proteins using recombinant DNA technology.

[0193] 5.6.4 Assays for Identification of Compounds That Ameliorate Disorders Affecting Development and Cell Differentiation

[0194] Compounds, including, but are not limited to, binding compounds identified via assay techniques such as those described above, can be tested for the ability to ameliorate development and cell differentiation disorder symptoms. The assays described above can identify compounds which affect the activity of peptides and proteins of the current invention (e.g., compounds that bind to the peptides and proteins of the current invention, inhibit binding of their natural ligands, and compounds that bind to a natural ligand of the peptides and proteins of the current invention and neutralize the ligand activity); or compounds that affect the activity of genes encoding peptides and proteins of the current invention (by affecting the expression of those genes, including molecules, e.g., proteins or small organic molecules, that affect or interfere with splicing events so that expression of the genes of interest can be modulated). However, it should be noted that the assays described herein can also identify compounds that modulate signal transduction or catalytic events that the peptides and proteins of the current invention are involved in. The identification and use of such compounds which affect a step in, for example, signal transduction pathways or catalytic events in which any of the peptides and proteins of the current invention are involved in, may modulate the effect of the peptides and proteins of the current invention on developmental or cell differentiation disorders. Such identification and use of such compounds are within the scope of the invention. Such compounds can be used as part of a therapeutic method for the treatment of developmental and cell differentiation disorders.

[0195] The invention encompasses cell-based and animal model-based assays for the identification of compounds exhibiting such an ability to ameliorate developmental and cell differentiation disorder symptoms. Such cell-based assay systems can also be used as the standard to assay for purity and potency of the natural ligand, catalytic subunit, including recombinantly or synthetically produced catalytic subunit and catalytic subunit mutants.

[0196] Cell-based systems can be used to identify compounds which may act to ameliorate developmental or cell differentiation disorder symptoms. Such cell systems can include, for example, recombinant or non-recombinant cells, such as cell lines, which express the gene encoding the peptide or protein of interest of the current invention. For example ES cells, or cell lines derived from ES cells can be used. In addition, expression host cells (e.g., COS cells, CHO cells, fibroblasts, Sf9 cells) genetically engineered to express a functional peptide or protein of the current invention in addition to factors necessary for the peptide or protein of the current invention to fulfil its physiological role of, for example, signal transduction or catalysis, can be used as an end point in the assay.

[0197] In utilizing such cell systems, cells may be exposed to a compound suspected of exhibiting an ability to ameliorate developmental or cell differentiation disorder symptoms, at a sufficient concentration and for a time sufficient to elicit such an amelioration of such disorder symptoms in the exposed cells. After exposure, the cells can be assayed to measure alterations in the expression of the gene encoding the peptide or protein of interest of the current invention, e.g., by assaying cell lysates for the appropriate mRNA transcripts (e.g., by Northern analysis) or for expression of the peptide or protein of interest of the current invention in the cell; compounds which regulate or modulate expression of the gene encoding the peptide or protein of interest of the current invention are valuable candidates as therapeutics. Alternatively, the cells are examined to determine whether one or more developmental or cell differentiation disorder-like cellular phenotypes has been altered to resemble a more normal or more wild type phenotype, or a phenotype more likely to produce a lower incidence or severity of disorder symptoms. Still further, the expression and/or activity of components of pathways or functionally or physiologically connected peptides or proteins of which the peptide or protein of interest of the current invention is a part, can be assayed.

[0198] For example, after exposure of the cells, cell lysates can be assayed for the presence of increased levels of the test compound as compared to lysates derived from unexposed control cells. The ability of a test compound to inhibit production of the assay compound such systems indicates that the test compound inhibits signal transduction initiated by the peptide or protein of interest of the current invention. Finally, a change in cellular morphology of intact cells may be assayed using techniques well known to those of skill in the art.

[0199] In addition, animal-based development or cell differentiation disorder systems, which may include, for example, mice, may be used to identify compounds capable of ameliorating development or cell differentiation disorder-like symptoms. Such animal models may be used as test systems for the identification of drugs, pharmaceuticals, therapies and interventions which may be effective in treating such disorders. For example, animal models may be exposed to a compound, suspected of exhibiting an ability to ameliorate development or cell differentiation disorder symptoms, at a sufficient concentration and for a time sufficient to elicit such an amelioration of development and/or cell differentiation disorder symptoms in the exposed animals. The response of the animals to the exposure may be monitored by assessing the reversal of disorders associated with development and/or cell differentiation disorders. With regard to intervention, any treatments which reverse any aspect of development or cell differentiation disorder-like symptoms should be considered as candidates for human development and/or cell differentiation disorder therapeutic intervention. Dosages of test agents may be determined by deriving dose-response curves, as discussed below.

[0200] 5.7 The Treatment of Disorders Associated with Stimulation of Peptides and Proteins of the Current Invention

[0201] The invention also encompasses methods and compositions for modifying development and cell differentiation and treating development and cell differentiation disorders. For example, one may decrease the level of expression of one or more genes of the current invention, and/or downregulate activity of one or more of the peptides or proteins of interest of the current invention. Thereby, the response of cells, like, for example, ES cells, to factors which activate the physiological responses that enhance the pathological processes leading to developmental and cell differentiation disorders may be reduced and the symptoms ameliorated. Conversely, the response of cells, like, for example, ES cells, to physiological stimuli involving any of the peptides or proteins of the current invention and necessary for proper developmental and cell differentiation processes may be augmented by increasing the activity of one or several of the peptides or proteins of interest of the current invention. Different approaches are discussed below.

[0202] 5.7.1 Inhibition of Peptides and Proteins of the Current Invention to Reduce Development and Cell Differentiation Disorders

[0203] Any method which neutralizes the catalytic or signal transduction activity of the peptides and proteins of the current invention or which inhibits expression of the genes encoding peptides and proteins (either transcription or translation) can be used to reduce symptoms associated with developmental and cell differentiation disorders.

[0204] In one embodiment, immuno therapy can be designed to reduce the level of endogenous gene expression for the peptides and proteins of the current invention, e.g., using antisense or ribozyme approaches to inhibit or prevent translation of mRNA transcripts; triple helix approaches to inhibit transcription of the genes; or targeted homologous recombination to inactivate or “knock out” the genes or its endogenous promoter.

[0205] Antisense approaches involve the design of oligonucleotides (either DNA or RNA) that are complementary to mRNA specific for peptides and proteins of interest of the current invention. The antisense oligonucleotides will bind to the complementary mRNA transcripts and prevent translation. Absolute complementarity, although preferred, is not required. A sequence “complementary” to a portion of an RNA, as referred to herein, means a sequence having sufficient complementarity to be able to hybridize with the RNA, forming a stable duplex. In the case of double-stranded antisense nucleic acids, a single strand of the duplex DNA may thus be tested, or triplex formation may be assayed. The ability to hybridize will depend on both the degree of complementarity and the length of the antisense nucleic acid. Generally, the longer the hybridizing nucleic acid, the more base mismatches with an RNA it may contain and still form a stable duplex (or triplex, as the case may be). One skilled in the art can ascertain a tolerable degree of mismatch by use of standard procedures to determine the melting point of the hybridized complex.

[0206] Oligonucleotides that are complementary to the 5′ end of the message, e.g., the 5′ untranslated sequence up to and including the AUG initiation codon, should work most efficiently at inhibiting translation. However, sequences complementary to the 3′ untranslated sequences of mRNAs have recently shown to be effective at inhibiting translation of mRNAs as well. See generally, Wagner, R., 1994, Nature 372:333-335. Thus, oligonucleotides complementary to either the 5′- or 3′-non-translated, non-coding regions of the mRNAs specific for the peptides and proteins of the current invention could be used in an antisense approach to inhibit translation of those endogenous mRNAs. Oligonucleotides complementary to the 5′ untranslated region of the mRNA should include the complement of the AUG start codon. Antisense oligonucleotides complementary to mRNA coding regions are less efficient inhibitors of translation but could be used in accordance with the invention. Whether designed to hybridize to the 5′-, 3′- or coding region of an mRNA, antisense nucleic acids should be at least six nucleotides in length, and are preferably oligonucleotides ranging from 6 to about 50 nucleotides in length. In specific aspects the oligonucleotide is at least 10 nucleotides, at least 17 nucleotides, at least 25 nucleotides or at least 50 nucleotides.

[0207] Regardless of the choice of target sequence, it is preferred that in vitro studies are first performed to quantitate the ability of the antisense oligonucleotide to inhibit gene expression. It is preferred that these studies utilize controls that distinguish between antisense gene inhibition and nonspecific biological effects of oligonucleotides. It is also preferred that these studies compare levels of the target RNA or protein with that of an internal control RNA or protein. Additionally, it is envisioned that results obtained using the antisense oligonucleotide are compared with those obtained using a control oligonucleotide. It is preferred that the control oligonucleotide is of approximately the same length as the test oligonucleotide and that the nucleotide sequence of the oligonucleotide differs from the antisense sequence no more than is necessary to prevent specific hybridization to the target sequence.

[0208] The oligonucleotides can be DNA or RNA or chimeric mixtures or derivatives or modified versions thereof, single-stranded or double-stranded. The oligonucleotide can be modified at the base moiety, sugar moiety, or phosphate backbone, for example, to improve stability of the molecule, hybridization, etc. The oligonucleotide may include other appended groups such as peptides (e.g., for targeting host cell receptors in vivo), or agents facilitating transport across the cell membrane (see, e.g., Letsinger et al., 1989, Proc. Natl. Acad. Sci. U.S.A. 86:6553-6556; Lemaitre et al., 1987, Proc. Natl. Acad. Sci. 84:648-652; PCT Publication No. WO88/09810, published Dec. 15, 1988), or hybridization-triggered cleavage agents. (See, e.g., Krol et al., 1988, BioTechniques 6:958-976) or intercalating agents. (See, e.g., Zon, 1988, Pharm. Res. 5:539-549). To this end, the oligonucleotide may be conjugated to another molecule, e.g., a peptide, hybridization triggered cross-linking agent, transport agent, hybridization-triggered cleavage agent, etc.

[0209] The antisense oligonucleotide may comprise at least one modified base moiety which is selected from the group including, but are not limited to, 5-fluorouracil, 5-bromouracil, 5-chlorouracil, 5-iodouracil, hypoxanthine, xantine, 4-acetylcytosine, 5-(carboxyhydroxylmethyl) uracil, 5-carboxymethylaminomethyl-2-thiouridine, 5-carboxymethylaminomethyluracil, dihydrouracil, beta-D-galactosylqueosine, inosine, N6-isopentenyladenine, 1-methylguanine, 1-methylinosine, 2,2-dimethylguanine, 2-methyladenine, 2-methylguanine, 3-methylcytosine, 5-methylcytosine, N6-adenine, 7-methylguanine, 5-methylaminomethyluracil, 5-methoxyaminomethyl-2-thiouracil, beta-D-mannosylqueosine, 5′-methoxycarboxymethyluracil, 5-methoxyuracil, 2-methylthio-N6-isopentenyladenine, uracil-5-oxyacetic acid (v), wybutoxosine, pseudouracil, queosine, 2-thiocytosine, 5-methyl-2-thiouracil, 2-thiouracil, 4-thiouracil, 5-methyluracil, uracil-5-oxyacetic acid methylester, uracil-5-oxyacetic acid (v), 5-methyl-2-thiouracil, 3-(3-amino-3-N-2-carboxypropyl) uracil, (acp3)w, and 2,6-diaminopurine.

[0210] The antisense oligonucleotide may also comprise at least one modified sugar moiety selected from the group including, but are not limited to, arabinose, 2-fluoroarabinose, xylulose, and hexose.

[0211] In another embodiment, the antisense oligonucleotide comprises at least one modified phosphate backbone selected from the group consisting of a phosphorothioate, a phosphorodithioate, aphosphoramidothioate, a phosphoramidate, a phosphordiamidate, a methylphosphonate, an alkyl phosphotriester, and a formacetal or analog thereof.

[0212] In yet another embodiment, the antisense oligonucleotide is an alpha-anomeric oligonucleotide. An alpha-anomeric oligonucleotide forms specific double-stranded hybrids with complementary RNA in which, contrary to the usual alpha-units, the strands run parallel to each other (Gautier et al., 1987, Nucl. Acids Res. 15:6625-6641). The oligonucleotide is a 2′-0-methylribonucleotide (Inoue et al., 1987, Nucl. Acids Res. 15:6131-6148), or a chimeric RNA-DNA analogue (Inoue et al., 1987, FEBS Lett. 215:327-330).

[0213] Oligonucleotides of the invention may be synthesized by standard methods known in the art, e.g. by use of an automated DNA synthesizer (such as are commercially available from Biosearch, Applied Biosystems, etc.). As examples, phosphorothioate oligonucleotides may be synthesized by the method of Stein et al., 1988, Nucl. Acids Res. 16:3209. Methylphosphonate oligonucleotides can be prepared by use of controlled pore glass polymer supports (Sarin et al., 1988, Proc. Natl. Acad. Sci. U.S.A. 85:7448-7451).

[0214] While antisense nucleotides complementary to the coding region sequence specific for the peptides and proteins of the current invention could be used, those complementary to the transcribed untranslated region are most preferred. The antisense molecules should be delivered to cells which express the peptides and proteins of interest of the current invention in vivo, like, for example, ES cells. A number of methods have been developed for delivering antisense DNA or RNA to cells; e.g., antisense molecules can be injected directly into the tissue or cell derivation site, or modified antisense molecules, designed to target the desired cells (e.g., antisense linked to peptides or antibodies that specifically bind receptors or antigens expressed on the target cell surface) can be administered systemically.

[0215] However, it is often difficult to achieve intracellular concentrations of antisense molecules that are sufficient to suppress translation of endogenous mRNAs. Therefore a preferred approach utilizes a recombinant DNA construct in which the antisense oligonucleotide is placed under the control of a strong pol III or pol II promoter. The use of such a construct to transfect target cells in the patient will result in the transcription of sufficient amounts of single stranded RNAs that will form complementary base pairs with the endogenous transcripts specific for the peptides and proteins of interest of the current invention and thereby prevent translation of the respective mRNAs. For example, a vector can be introduced in vivo such that it is taken up by a cell and directs the transcription of an antisense RNA. Such a vector can remain episomal or become chromosomally integrated, as long as it can be transcribed to produce the desired antisense RNA. Such vectors can be constructed by recombinant DNA technology methods standard in the art. Vectors can be plasmid, viral, or others known in the art, used for replication and expression in mammalian cells. Expression of the sequence encoding the antisense RNA can be by any promoter known in the art to act in mammalian, preferably human cells. Such promoters can be inducible or constitutive. Such promoters include, but are not limited to: the SV40 early promoter region (Bernoist and Chambon, 1981, Nature 290:304-310), the promoter contained in the 3′ long terminal repeat of Rous sarcoma virus (Yamamoto et al., 1980, Cell 22:787-797), the herpes thymidine kinase promoter (Wagner et al., 1981, Proc. Natl. Acad. Sci. U.S.A. 78:1441-1445), the regulatory sequences of the metallothionein gene (Brinster et al., 1982, Nature 296:39-42), etc. Any type of plasmid, cosmid, YAC or viral vector can be used to prepare the recombinant DNA construct which can be introduced directly into the tissue or cell derivation site; e.g., the bone marrow. Alternatively, viral vectors can be used which selectively infect the desired tissue or cell type; (e.g., viruses which infect cells of hematopoietic lineage), in which case administration may be accomplished by another route (e.g., systemically).

[0216] Ribozyme molecules designed to catalytically cleave mRNA transcripts specific for the peptides and proteins of interest of the current invention can also be used to prevent translation of the mRNAs of interest and expression of the peptides and proteins encoded by those mRNAs. (See, e.g., PCT International Publication WO90/11364, published Oct. 4, 1990; Sarver et al., 1990, Science 247:1222-1225). While ribozymes that cleave mRNA at site specific recognition sequences can be used to destroy mRNAs, the use of hammerhead ribozymes is preferred. Hammerhead ribozymes cleave mRNAs at locations dictated by flanking regions that form complementary base pairs with the target mRNA. The sole requirement is that the target mRNA have the following sequence of two bases: 5′-UG-3′. The construction and production of hammerhead ribozymes is well known in the art and is described more fully in Haseloff and Gerlach, 1988, Nature, 334:585-591. Preferably the ribozyme is engineered so that the cleavage recognition site is located near the 5′ end of the mRNA of interest; i.e., to increase efficiency and minimize the intracellular accumulation of non-functional mRNA transcripts.

[0217] The ribozymes of the present invention also include RNA endoribonucleases (hereinafter “Cech-type ribozymes”) such as the one which occurs naturally in Tetrahymena Thermophila (known as the IVS, or L-19 IVS RNA) and which has been extensively described by Thomas Cech and collaborators (Zaug et al., 1984, Science, 224:574-578; Zaug and Cech, 1986, Science, 231:470-475; Zaug et al., 1986, Nature, 324:429-433; published International Patent Application No. WO 88/04300 by University Patents Inc.; Been and Cech, 1986, Cell, 47:207-216). The Cech-type ribozymes have an eight base pair active site which hybridizes to a target RNA sequence where after cleavage of the target RNA takes place. The invention encompasses those Cech-type ribozymes which target eight base-pair active site sequences that are present in the mRNAs specific for the peptides and proteins of interest of the current invention.

[0218] As in the antisense approach, the ribozymes can be composed of modified oligonucleotides (e.g. for improved stability, targeting, etc.) and should be delivered to cells which express the peptides and proteins of interest of the current invention in vivo, like, for example, ES cells. A preferred method of delivery involves using a DNA construct “encoding” the ribozyme under the control of a strong constitutive pol III or pol II promoter, so that transfected cells will produce sufficient quantities of the ribozyme to destroy the endogenous messages specific for the peptides and proteins of interest of the current invention and inhibit translation. Because ribozymes unlike antisense molecules, are catalytic, a lower intracellular concentration is required for efficiency.

[0219] Endogenous gene expression can also be reduced by inactivating or “knocking out” the gene of interest specific for a peptide or protein of the current invention or its promoter using targeted homologous recombination. (e.g., see Smithies et al., 1985, Nature 317:230-234; Thomas & Capecchi, 1987, Cell 51:503-512; Thompson et al., 1989 Cell 5:313-321; each of which is incorporated by reference herein in its entirety). For example, a mutant, non-functional peptide or protein of interest of the current invention (or a completely unrelated DNA sequence) flanked by DNA homologous to the endogenous gene encoding said peptide or protein of interest of the current invention (either the coding regions or regulatory regions of the gene) can be used, with or without a selectable marker and/or a negative selectable marker, to transfect cells that express said peptide or protein of interest of the current invention in vivo. Insertion of the DNA construct, via targeted homologous recombination, results in inactivation of the targeted endogenous gene. Such approaches are particularly suited in the agricultural field where modifications to ES cells can be used to generate animal offspring with an inactive copy of a gene encoding a peptide or protein of interest of the current invention (e.g., see Thomas & Capecchi 1987 and Thompson 1989, supra). However this approach can be adapted for use in humans provided the recombinant DNA constructs are directly administered or targeted to the required site in vivo using appropriate viral vectors.

[0220] Alternatively, endogenous expression of a gene of interest can be reduced by targeting deoxyribonucleotide sequences complementary to the regulatory region of said gene (i.e., the promoter and/or enhancers) to form triple helical structures that prevent transcription of the gene of interest in target cells in the body. (See generally, Helene, C. 1991, Anticancer Drug Des., 6(6):569-84; Helene, C. et al., 1992, Ann, N.Y. Acad. Sci., 660:27-36; and Maher, L. J., 1992, Bioassays 14(12):807-15).

[0221] In yet another embodiment of the invention, the activity of a peptide or protein of interest of the current invention can be reduced using a “dominant negative” approach. A dominant negative approach takes advantage of the interaction of the peptides or proteins of interest with other peptides or proteins to form complexes, the formation of which is a prerequisite for the peptide or protein of interest of the current invention to exert its physiological activity. To this end, constructs which encode a defective form of the peptide or protein of interest of the current invention can be used in gene therapy approaches to diminish the activity of said peptide or protein of interest in appropriate target cells. Alternatively, targeted homologous recombination can be utilized to introduce such deletions or mutations into the subject's endogenous gene encoding the peptide or protein of interest of the current invention in the appropriate tissue. The engineered cells will express non-functional copies of the peptide or protein of interest of the current invention, thereby downregulating its activity in vivo. Such engineered cells should demonstrate a diminished response to physiological stimuli of the activity of the affected peptide or protein of interest of the current invention, resulting in reduction of the development or cell differentiation disorder phenotype.

[0222] 5.7.2 Restoration or Increase in Expression or Activity of a Peptide or Protein of the Current Invention to Promote Development or Cell Differentiation

[0223] With respect to an increase in the level of normal gene expression and/or gene product activity specific for any of the peptides and proteins of interest of the current invention, the respective nucleic acid sequences can be utilized for the treatment of development and cell differentiation disorders. Where the cause of the development or cell differentiation dysfunction is a defective peptide or protein of the current invention, treatment can be administered, for example, in the form of gene delivery or gene therapy. Specifically, one or more copies of a normal gene or a portion of the gene that directs the production of a gene product exhibiting normal function of the appropriate peptide or protein of the current invention, may be inserted into the appropriate cells within a patient or animal subject, optionally using suitable vectors. Recombinant retroviruses have been widely used in gene transfer or gene delivery experiments and even human clinical trials (see generally, Mulligan, R. C., Chapter 8, In: Experimental Manipulation of Gene Expression, Academic Press, pp. 155-173 (1983); Coffin, J., In: RNA Tumor Viruses, Weiss, R. et al. (eds.), Cold Spring Harbor Laboratory, Vol. 2, pp. 36-38 (1985). Other eucaryotic viruses which have been used as vectors to transduce mammalian cells include adenovirus, papilloma virus, herpes virus, adeno-associated virus, vaccinia virus, rabies virus, and the like (See generally, Sambrook et al., Molecular Cloning, Cold Spring Harbor Laboratory Press, Cold Spring Harbor, N.Y., Vol. 3:16.1-16.89 (1989). Alternatively, cationic or other lipids may be employed to deliver polynucleotides comprising (or including) the described GTS sequences to patients. Additionally, naked DNA comprising one or more GTS sequences, optionally modified by the addition of one or more of, in operable combination and orientation, a promoter, an enhancer, a ribosome entry or ribosome binding site, and/or an in-frame translation initiation codon can be employed to deliver GTSs to a patient. Another use of the above constructs includes “naked” DNA vaccines that can be introduced in vivo alone, or in conjunction with excipients, or microcarrier spheres, nanoparticles or other supporting or dosaging compounds or molecules.

[0224] The gene replacement/delivery therapies described above should be capable of delivering gene sequences to the cell types within patients which express the peptide or protein of interest of the current invention. Alternatively, targeted homologous recombination can be utilized to correct the defective endogenous gene in the appropriate cell type. In animals, targeted homologous recombination can be used to correct the defect in ES cells in order to generate offspring with a corrected trait.

[0225] Finally, compounds identified in the assays described above that stimulate, enhance, or modify the activity of the peptides and proteins of the current invention can be used to achieve proper development and cell differentiation. The formulation and mode of administration will depend upon the physico-chemical properties of the compound.

[0226] 5.8 Pharmaceutical Preparations and Methods of Administration

[0227] Compounds that are determined to affect gene expression of the peptides and proteins of the current invention, comprise nucleotide sequence information that is at least partially first disclosed in the Sequence Listing (i.e., sequences used in antisense, gene therapy, dsRNA, or ribozyme applications), or the interaction of such peptides and proteins with any of their binding partners, can be administered to a patient at therapeutically effective doses to treat or ameliorate development and cell differentiation disorders. A therapeutically effective dose refers to that amount of the compound sufficient to result in any amelioration or retardation of disease symptoms, or development and cell differentiation or proliferation disorders.

[0228] 5.8.1 Effective Dose

[0229] Toxicity and therapeutic efficacy of such compounds can be determined by standard pharmaceutical procedures in cell cultures or experimental animals, e.g., for determining the LD₅₀ (the dose lethal to 50% of the population) and the ED₅₀ (the dose therapeutically effective in 50% of the population). The dose ratio between toxic and therapeutic effects is the therapeutic index and it can be expressed as the ratio LD₅₀/ED₅₀. Compounds which exhibit large therapeutic indices are preferred. While compounds that exhibit toxic side effects may be used, care should be taken to design a delivery system that targets such compounds to the site of affected tissue in order to minimize potential damage to uninfected cells and, thereby, reduce side effects.

[0230] The data obtained from the cell culture assays and animal studies can be used in formulating a range of dosage for use in humans. The dosage of such compounds lies preferably within a range of circulating concentrations that include the ED₅₀ with little or no toxicity. The dosage may vary within this range depending upon the dosage form employed and the route of administration utilized. For any compound used in the method of the invention, the therapeutically effective dose can be estimated initially from cell culture assays. A dose may be formulated in animal models to achieve a circulating plasma concentration range that includes the IC₅₀ (i.e., the concentration of the test compound which achieves a half-maximal inhibition of symptoms) as determined in cell culture. Such information can be used to more accurately determine useful doses in humans. Levels in plasma may be measured, for example, by high performance liquid chromatography.

[0231] When the therapeutic treatment of disease is contemplated, the appropriate dosage may also be determined using animal studies to determine the maximal tolerable dose, or MTD, of a bioactive agent per kilogram weight of the test subject. In general, at least one animal species tested is mammalian. Those skilled in the art regularly extrapolate doses for efficacy and avoiding toxicity to other species, including human. Before human studies of efficacy are undertaken, Phase I clinical studies in normal subjects help establish safe doses.

[0232] Additionally, the bioactive agent may be complexed with a variety of well established compounds or structures that, for instance, enhance the stability of the bioactive agent, or otherwise enhance its pharmacological properties (e.g., increase in vivo half-life, reduce toxicity, etc.).

[0233] The above therapeutic agents will be administered by any number of methods known to those of ordinary skill in the art including, but not limited to, administration by inhalation; by subcutaneous (sub-q), intravenous (I.V.), intraperitoneal (I.P.), intramuscular (I.M.), or intrathecal injection; or as a topically applied agent (transderm, ointments, creams, salves, eye drops, and the like).

[0234] 5.8.2 Formulations and Use

[0235] Pharmaceutical compositions for use in accordance with the present invention may be formulated in conventional manner using one or more physiologically acceptable carriers or excipients.

[0236] Thus, the compounds and their physiologically acceptable salts and solvates may be formulated for administration by inhalation or insufflation (either through the mouth or the nose) or oral, buccal, parenteral or rectal administration.

[0237] For oral administration, the pharmaceutical compositions may take the form of, for example, tablets or capsules prepared by conventional means with pharmaceutically acceptable excipients such as binding agents (e.g., pregelatinised maize starch, polyvinylpyrrolidone or hydroxypropyl methylcellulose); fillers (e.g., lactose, microcrystalline cellulose or calcium hydrogen phosphate); lubricants (e.g., magnesium stearate, talc or silica); disintegrants (e.g., potato starch or sodium starch glycolate); or wetting agents (e.g., sodium lauryl sulphate). The tablets may be coated by methods well known in the art. Liquid preparations for oral administration may take the form of, for example, solutions, syrups or suspensions, or they may be presented as a dry product for constitution with water or other suitable vehicle before use. Such liquid preparations may be prepared by conventional means with pharmaceutically acceptable additives such as suspending agents (e.g., sorbitol syrup, cellulose derivatives or hydrogenated edible fats); emulsifying agents (e.g., lecithin or acacia); non-aqueous vehicles (e.g., almond oil, oily esters, ethyl alcohol or fractionated vegetable oils); and preservatives (e.g., methyl or propyl-p-hydroxybenzoates or sorbic acid). The preparations may also contain buffer salts, flavoring, coloring and sweetening agents as appropriate.

[0238] Preparations for oral administration may be suitably formulated to give controlled release of the active compound.

[0239] For buccal administration the compositions may take the form of tablets or lozenges formulated in conventional manner.

[0240] For administration by inhalation, the compounds for use according to the present invention are conveniently delivered in the form of an aerosol spray presentation from pressurized packs or a nebulizer, with the use of a suitable propellant, e.g., dichlorodifluoromethane, trichlorofluoromethane, dichlorotetrafluoroethane, carbon dioxide or other suitable gas. In the case of a pressurized aerosol the dosage unit may be determined by providing a valve to deliver a metered amount. Capsules and cartridges of e.g. gelatin for use in an inhaler or insufflator may be formulated containing a powder mix of the compound and a suitable powder base such as lactose or starch.

[0241] The compounds may be formulated for parenteral administration by injection, e.g., by bolus injection or continuous infusion. Formulations for injection may be presented in unit dosage form, e.g., in ampules or in multi-dose containers, with an added preservative. The compositions may take such forms as suspensions, solutions or emulsions in oily or aqueous vehicles, and may contain formulatory agents such as suspending, stabilizing and/or dispersing agents. Alternatively, the active ingredient may be in powder form for constitution with a suitable vehicle, e.g., sterile pyrogen-free water, before use.

[0242] The compounds may also be formulated as compositions for rectal administration such as suppositories or retention enemas, e.g., containing conventional suppository bases such as cocoa butter or other glycerides.

[0243] In addition to the formulations described previously, the compounds may also be formulated as a depot preparation. Such long acting formulations may be administered by implantation (for example subcutaneously or intramuscularly) or by intramuscular injection. Thus, for example, the compounds may be formulated with suitable polymeric or hydrophobic materials (for example as an emulsion in an acceptable oil) or ion exchange resins, or as sparingly soluble derivatives, for example, as a sparingly soluble salt. The compositions may, if desired, be presented in a pack or dispenser device which may contain one or more unit dosage forms containing the active ingredient. The pack may for example comprise metal or plastic foil, such as a blister pack. The pack or dispenser device may be accompanied by instructions for administration.

[0244] 5.9. Analysis of the Human Genome Using the GTSs of the Present Invention

[0245] The Human Genome Project and privately financed ventures will provide the world with a copy of the sequence of each human chromosome. However, the overwhelming majority of such genomic sequence information does not encode proteins, and that portion that does encode proteins, is generally dispersed as exons amidst large regions of intervening intronic sequence. Thus, in order to effectively make genomic sequence information useful, identification of the coding regions, splice junctions and chromosomal location will generally be necessary.

[0246] Within any cell in the human body there are estimated to be between 10,000 and 20,000 different genes which are actually expressed among a estimated 50,000-125,000 total genes. Within this group there are those that are abundantly expressed, the “house-keeping” genes among others, those that are moderately expressed, and those that are rarely expressed. Rarely expressed genes are often those that attract the most scientific interest in relation to disease, development, and cell cycle processes. The majority of key proteins in these processes, many of which encode enzymes, are either rarely expressed, or expressed in a tightly controlled fashion. Expressed Sequence Tags (ESTS) have been used for identifying coding regions in the human genome. However, because of the techniques used for identifying ESTs, the majority of genes that have been identified through EST technology are those that are abundantly expressed in the cell. In addition, there has been a huge overlap in identification of those genes at the higher end of the expression curve. Because of this, there is an estimated 30-40% of the human genes that remain undiscovered. Therefore, identification of rarely expressed sequences is a major goal of molecular biologists.

[0247] The described gene trap technology allows for the identification of such rarely expressed sequences. Because the gene trap technology does not rely on endogenous promoters, there is an essentially equal chance of isolating a sequence that is normally rarely expressed in the cell as there is of a chance isolating a sequence that is normally highly expressed in the cell. Accordingly, a key advantage of gene trapping is that it allows for the identification and isolation rarely expressed sequences in a fraction of the time necessary to isolate the such sequences by previous technologies. For example, of the first 20,000 human genes identified by gene trapping, approximately 10,000 had never been discovered when compared to published gene sequence databases. Therefore, SEQ ID NOS:9-1,008 comprise a significant percentage of rarely expressed sequences and allow the study of key elements of cellular processes as well as the best targets for therapeutic intervention.

[0248] For the identification of sequences as “rarely expressed”, the expression pattern in a variety of tissues, cell lines, and cancer cells can be determined using techniques known to one of skill in the art including Northern blot technology, Quantitative PCR, etc. Obtaining a weak or nonexistent signal in the majority of cases would suggest the sequences is “rarely expressed”. A GTS corresponding to a rarely expressed sequence would be particularly useful, especially in a gene chip or comparable hybridization technology.

[0249] An additional feature of the described GTSs is that they do not display the 3′ bias typical of EST sequences obtained by conventional methods, and are thus more likely to provide information from the coding region of genes as opposed to 3′ (or 5′) untranslated regions.

[0250] When the sequences obtained from complete and partial GTSs from SEQ ID NOS:9-1,008 are overlaid onto the map of the human genome, a variety of information can be obtained including, for example, coding regions (exons), splice junctions, and chromosomal locations.

[0251] In order to analyze the described GTSs, or overlay the described GTSs on human genomic sequence, a computer based system can be used. A search program for accessing a human genome database is used. The sequence from any one of SEQ ID NOS:9-1,008 or a full-length clone is compared and aligned to the human genome allowing for gaps. Where homologous genomic sequence is found, a given GTS or full length sequence will typically identify several dispersed regions of homology, and the intervening gaps will generally constitute introns.

[0252] The GTSs can also be used to identify the specific locations of exon splice junctions. These can be particularly important in the study of disease and cancer. Splice junctions can often be hot spots for erroneous events leading to these disease states.

[0253] As mentioned previously, the described GTSs can be used to identify the chromosomal location of a coding region which is an important piece of information when looking for those regions of the human genome involved in genetic disease, cancer, and predispositions to various disease states. Chromosomal translocations have been found to be associated with a number of disease states, and often it is possible to locate a gross chromosome position for a disease-associated gene. The information obtained from the coding sequences and locations will assist investigators who are trying to pinpoint the exact location of a potentially disease-associated gene.

[0254] The chromosomal location can be identified or an experimentally determined location confirmed by layering or aligning the sequence as discussed to identify splice junctions. Alternatively, a specific location on a chromosome can be “searched” for the correct sequence.

[0255] 5.10 Computer Related Embodiments

[0256] The nucleotide sequences provided in SEQ ID NOS:9-1,008, a representative fragments thereof, or nucleotide sequence at least 99% identical to SEQ ID NOS:9-1,008 can be “provided” in a variety of mediums to facilitate use thereof. As used herein, provided refers to a manufacture, other than an isolated nucleic acid molecule, which contains a nucleotide sequence of the present invention, i.e., the nucleotide sequence provided in SEQ ID NOS:9-1,008, a representative fragment thereof, or a nucleotide sequence at least 99% identical so SEQ ID NOS:9-1,008. Such a manufacture provides the Homo sapiens genome or a subset thereof (e.g., a Homo sapiens open reading frame (ORF)) in a form which allows a skilled artisan to examine the manufacture using means not directly applicable to examining the Homo sapiens genome or a subset thereof as it exists in nature or in purified form.

[0257] In one application of this embodiment, a nucleotide sequence of the present invention can be recorded on computer readable media. As used herein, “computer readable media” refers to any medium which can be read and accessed directly by a computer. Such media include, but are not limited to: magnetic storage media, such as floppy discs, hard disc storage medium, and magnetic tape; optical storage media such as CD-ROM; electrical storage media such as RAM and ROM; and hybrids of these categories such as magnetic/optical storage media. A skilled artisan can readily appreciate how any of the presently known computer readable mediums can be used to create a manufacture comprising computer readable medium having recorded thereon a nucleotide sequence of the present invention.

[0258] As used herein, “recorded” refers to a process for storing information on computer readable medium. A skilled artisan can readily adopt any of the presently known methods for recording information on computer readable medium to generate manufactures comprising the nucleotide sequence information of the present invention.

[0259] A variety of data storage structures are available to a skilled artisan for creating a computer readable medium having recorded thereon a nucleotide sequence of the present invention. The choice of the data storage structure will generally be based on the means chosen to access the stored information. In addition, a variety of data processor programs and formats can be used to store the nucleotide sequence information of the present invention on computer readable medium. The sequence information can be represented in a word processing text file, formatted in commercially-available software such as WordPerfect and MicroSoft Word, or represented in the form of an ASCII file, stored in a database application, such as DB2, Sybase, Oracle, or the like. A skilled artisan can readily adapt any number of data processor structuring formats (e.g., text file or database) in order to obtain computer readable medium having recorded thereon the nucleotide sequence information of the present invention.

[0260] By providing the nucleotide sequence of SEQ ID NOS:9-1,008, a representative fragment thereof, or a nucleotide sequence at least 99% identical to SEQ ID NOS:9-1,008 in computer readable form, a skilled artisan can routinely access the sequence information for a variety of purposes Computer software is publicly available which allows a skilled artisan to access sequence information provided in a computer readable medium. Software that implements the BLAST (Altschul et al., J. Mol. Biol. 215:403-410 (1990)) and BLAZE (Brutlag et al., Comp. Chem. 17:203-207 (1993)) search algorithms on a Sybase system is used to identify open reading frames (ORFs) within the Homo sapiens genome which contain homology to ORFs or proteins from other organisms. Such ORFs are protein encoding fragments within the Homo sapiens genome and are useful in producing commercially important proteins such as enzymes used in fermentation reactions and in the production of commercially useful metabolites.

[0261] The present invention further provides systems, particularly computer-based systems, which contain the sequence information described herein. Such systems are designed to identify commercially important fragments of the Homo sapiens genome.

[0262] As used herein, “a computer-based system” refers to the hardware means, software means, and data storage means used to analyze the nucleotide sequence information of the present invention. The minimum hardware means of the computer-based systems of the present invention comprises a central process unit (CPU), input means, output means, and data storage means. A skilled artisan can readily appreciate that any one of the currently available computer-based system are suitable for use in the present invention.

[0263] As stated above, the computer-based systems of the present invention comprise a data storage means having stored therein a nucleotide sequence of the present invention and the necessary hardware means and software means for supporting and implementing a search means. As used herein, “data storage means” refers to memory which can store nucleotide sequence information of the present invention, or a memory access means which can access manufactures having recorded thereon the nucleotide sequence information of the present invention.

[0264] As used herein, “search means” refers to one or more programs which are implemented on the computer-based system to compare a target sequence with the sequence information stored within the data storage means. Search means are used to identify fragments or regions of the Homo sapiens genome which match a particular target sequence. A variety of known algorithms are disclosed publicly and a variety of commercially available software for conducting search means are and can be used in the computer-based systems of the present invention. Examples of such software includes, but is not limited to, MacPattern (EMBL), BLASTN and BLASTX (NCBIA). A skilled artisan can readily recognize that any one of the available algorithms or implementing software packages for conducting homology searches can be adapted for use in the present computer-based systems.

[0265] As used herein, a “target sequence” can be any DNA or amino acid sequence of six or more nucleotides or two or more amino acids. A skilled artisan can readily recognize that the longer a target sequence is, the less likely a target sequence will be present as a random occurrence in the database. The most preferred sequence length of a target sequence is from about 10 to 100 amino acids or from about 30 to 300 nucleotide residues. However, it is well recognized that searches for commercially important fragments of the Homo sapiens genome, such as sequence fragments involved in gene expression and protein processing, may be of shorter length.

[0266] A variety of structural formats for the inputs and output means can be used to input an output the information in the computer-based systems of the present invention. A preferred format for an output means ranks fragments of the Homo sapiens genome possessing varying degrees of homology to the target sequence. Such presentation provides a skilled artisan with a ranking of sequences which contain various amounts of the target sequence and identifies the degree of homology contained in the identified fragment.

[0267] A variety of comparing means can be used to compare a target sequence with the data storage means to identify sequence fragments of the Homo sapiens genome. Implementing software that implements the BLAST and BLAZE algorithms (Altschul et al., J. Mol. Biol. 215:403-410 (1990), Brutlag et al., Comp. Chem. 17:203-207 (1993)) is used to identify open reading frames within the Homo sapiens genome. A skilled artisan can readily recognize that any one of the publicly available homology search program scan be used to as the search means for the computer-based systems of the present invention.

[0268] On application of this embodiment is provided in FIG. 2. FIG. 2 provides a block diagram of a computer system 102 that can be used to implement the present invention. The computer system 102 includes a processor 106 connected to a bus 104. Also connected to the bus 104 are a main memory 108 (preferably implemented as random access memory, RAM) and a variety of secondary storage devices 110, such as a hard drive 112 and a removable medium storage device 114. The removable medium storage device 114 may represent, for example, a floppy disk drive, a CD-ROM drive, a magnetic tape drive, etc. A removable storage medium 116 (such as a floppy disk, a compact disk, a magnetic tape, etc.) containing control logic and/or data recorded therein may be inserted into the removable medium storage device 114. The computer system 102 includes appropriate software for reading the control logic and/or the data from the removable medium storage device 114 once inserted in the removable medium storage device 114. Similar systems and uses are described in U.S. Applications Ser. Nos. 60/044,031, 60/046,655, and 60/066,009 which are herein incorporated by reference in their entirety.

[0269] A nucleotide sequence of the present invention may be stored in a well known manner in the main memory 108, any of the secondary storage devices 110, and/or a removable storage medium 116. Software for accessing and processing the genomic sequence (such as search tools, comparing tools, etc.) reside in main memory 108 during execution.

[0270] The examples below are provided to illustrate the subject invention. These examples are provided by way of illustration and are not included for the purpose of limiting the invention in any way whatsoever.

### 6. EXAMPLES

[0271] 6.1 Construction of Gene Trapped cDNA Libraries

[0272] The GTSs represented in SEQ ID NOS:9-1,008 were generated using normalized cDNA libraries produced as described in U.S. application Ser. No. 60/095,989, filed Aug. 10, 1998 entitled “Construction of Normalized cDNA Libraries From Animal Cells” (also identified as attorney docket no. 8535-021-888), by Nehls et al., the disclosure of which is herein incorporated by reference in its entirety.

[0273] FIG. 1A provides a representative illustration of the retroviral vector used to produce the described polynucleotides. In brief, pools of modified human PA-1 teratocarcinoma cells (e.g., PA-2, PA-1 that has been transfected to express the murine ecotropic retrovirus receptor) were typically infected at an m.o.i between about 0.01 and about 0.1 (although much higher m.o.i.'s such as 1 to more than 10 could have been used). FIG. 1B schematically shows how the target cell genomic locus is presumably mutated by the integration of the retroviral construct into intronic sequences of the cellular gene. The integrated retrovirus results in the generation of two chimeric transcripts. As illustrated in FIG. 1C, the first chimeric transcript is a fusion between the coding region of the resistance marker (neo was used to produce the presently described GTSs) carried within the transgenic construct and the upstream exon(s) from the cellular gene. A mature transcript is generated when the indicated splice donor (SD) and splice acceptor (SA) sites are spliced. Translation of this fusion transcript produces the protein encoded by the resistance marker and allows for selection of gene trapped target cells, although selection is not required to produce the described polynucleotides.

[0274] Another chimeric transcript is shown in FIG. 1C. This transcript is a fusion between the first exon of the transgenic construct (EXON1—the first exon of the murine btk gene was used as the sequence acquisition component for the described GTSs) and downstream exons from the cellular genome. Unlike the transcript encoding the selectable marker exon, the transcript encoding EXON1 is transcribed under the control of a vector encoded, and hence exogenously added, promoter (such as the PGK promoter), and the corresponding mRNA is generated by splicing between the indicated SD and SA sites. The region encoding the sequence acquisition exon (EXON1) has also been engineered to incorporate a unique sequence that permits the selective enrichment of the fusion transcript using molecular biological methods such as, for example, the polymerase chain reaction (PCR). These sequences serve as unique primer binding sites for EXON1-specific PCR amplification of the transcript and can additionally incorporate one or several rare-cutter endonuclease restriction sites to allow site-specific cloning. These features allow for the efficient and preferential cloning of transgene expressed fusion transcripts from pools of target cells relative to the background of cellularly encoded transcripts.

[0275] Based on the unique sequence present in EXON1, that is schematically indicated as a rare-cutter (A) restriction site in FIG. 1B, selective cloning of the fusion transcript is achieved as shown in FIG. 1D. cDNA was generated by reverse transcribing isolated RNA from pools of cells that have undergone independent gene trap events using, for example, RTT-1 as a deoxyoligonucleotide primer. The 3′ end of the RTT-1 primer consisted of a homopolymeric stretch of deoxythymidine residues that bound to the polyadenylated end of the mRNA. At its 5′ end, the oligonucleotide contains a sequence that can serve as a binding site for a second and a third primer (GET-2 and GET-2N). In the center, RTT-1 contains the sequence of a second rare-cutter (B) restriction site. Depending on the size of the pool and the transcriptional levels of the fusion transcript, second strand synthesis was carried out either with deoxyoligonucleotide primer BTK-1 using Klenow polymerase or by a polymerase chain reaction (PCR) in the presence of primers BTK-1 and GET-2.

[0276] The second strand reaction products that were generated by PCR were digested with restriction endonucleases that recognize their corresponding restriction site (e.g., A and B). Additionally, PCR conditions were suitably modified using a variety of established procedures for enhancing the size of the PCR products. Such methods are described, inter alia, in U.S. Pat. No. 5,556,772, and/or the PanVera (Madison, Wis.) New Technologies for Biomedical Research catalog (1997/98) both of which are herein incorporated by reference. Prior to cloning, the PCR cDNA fragments were size-selected using conventional methods such as, for example, chromatography, gel-electrophoresis, and the like. Alternatively or in addition to this size selection, the PCR templates could have been previously size selected into separate template pools.

[0277] After digestion with suitable restriction enzymes, and size selection as described above, the cleaved cDNAs were directionally cloned into phage vectors (see FIG. 1D), although any other cloning vector/vehicle could have been used. Such vectors are generically referred to as gene trapped sequence vectors, or “GTS vectors” in FIG. 1D), preferably incorporating a multiple cloning site with restriction sites corresponding to those incorporated into the amplified cDNAs (e.g., Sfi I, which allows for directional cloning of the cDNAs). After cloning, the resulting phage were handled as a conventional cDNA library using standard procedures. Individual colonies and/or plaques were picked and used to generate PCR derived (using the primers indicated below) templates for DNA sequencing reactions.

[0278] A more detailed description of the above follows. The btk gene trap vector was introduced into human PA-2 cells using standard techniques. In brief, vector/virus containing supernatant from GP+E or AM12 packaging cells was added to approximately 50,000 cells (at an input ratio between about 0.1 and about 0.1 virus/target cell) for between about 16 to about 24 hours, and the cells were subsequently selected with G418 at active concentration of about 400 micrograms/ml for about 10 days. Between about 600 and about 3,000 G418 resistant colonies were subsequently pooled, and subjected to RNA isolation, reverse transcription, PCR, restriction digestion, size selection, and subcloning into lambda phage vectors. Individual phage plaques were directly amplified, purified, and sequenced to obtain the corresponding GTS.

[0279] When selection is not used, about 1×10⁶ cells (PA-2, Hela, HepG2, or Jurkatt cells) per 100 mm dish were plated and infected with AM12 packaged btk retrovirus at an m.o.i. of approximately 0.01. After a 16 h incubation, the cells were washed in PBS and grown in culture media for four days. RNA from each plate was extracted, reverse transcribed, and the resulting cDNA was subject to two rounds of PCR, each for 25 cycles. The resulting PCR products were digested with Sfi and separated by gel electrophoresis. Six size fractions (between about 300 and about 4,000 bp) were recovered and each fraction was ligated into lambdaGT10Sfi arms, in vitro packaged, and plated for lysis. Individual plaques were picked from the plates, subject to an additional round of PCR, and subsequently sequenced to obtain the described GTSs. The particulars are described in greater detail below.

[0280] FIG. 1 shows the chimeric fusion transcript that is formed when the first exon of the transgenic construct (EXON1—the first exon of the murine btk gene was used as the sequence acquisition component for the described GTSs) is spliced to downstream exons from the cellular genome. Unlike the transcript encoding the selectable marker exon, the transcript encoding EXON1 is transcribed under the control of a vector encoded, and hence exogenously added, promoter (such as the PGK promoter), and the corresponding mRNA is generated by splicing between the indicated SD and SA sites. The region encoding the sequence acquisition exon (EXON1) has also been engineered to incorporate a unique sequence that permits the selective enrichment of the fusion transcript using molecular biological methods such as, for example, the polymerase chain reaction (PCR). These sequences serve as unique primer binding sites for EXON1-specific PCR amplification of the transcript and can additionally incorporate one or several rare-cutter endonuclease restriction sites to allow site-specific cloning. These features allow for the efficient and preferential cloning of transgene expressed fusion transcripts from pools of target cells relative to the background of cellularly encoded transcripts.

[0281] Based on the unique sequence present in EXON1, that is schematically indicated as a rare-cutter (A) restriction site in FIG. 1B, selective cloning of the fusion transcript is achieved as shown in FIG. 1D. cDNA was generated by reverse transcribing isolated RNA from pools of cells that have undergone independent gene trap events using, for example, RTT-1 as a deoxyoligonucleotide primer. The 3′ end of the RTT-1 primer consisted of a homopolymeric stretch of deoxythymidine residues that bound to the polyadenylated end of the mRNA. At its 5′ end, the oligonucleotide contained a sequence that can serve as a binding site for a second and a third primer (GET-2 and GET-2N). In the center, RTT-1 contains the sequence of a second rare-cutter (B) restriction site. Depending on the size of the pool and the transcriptional levels of the fusion transcript, second strand synthesis was carried out either with deoxyoligonucleotide primer BTK-1 using Klenow polymerase or by a polymerase chain reaction (PCR) in the presence of primers BTK-1 and GET-2.

[0282] The second strand reaction products that were generated by PCR were digested with restriction endonucleases that recognize their corresponding restriction site (e.g., A and B). Additionally, PCR conditions were suitably modified using a variety of established procedures for enhancing the size of the PCR products. Such methods are described, inter alia, in U.S. Pat. No. 5,556,772, and/or the PanVera (Madison, Wis.) New Technologies for Biomedical Research catalog (1997/98) both of which are herein incorporated by reference. After digestion with suitable restriction enzymes, and size selection as described above, the cleaved cDNAs were directionally cloned into phage vectors (see FIG. 1D), although any other cloning vector/vehicle could have been used. Such vectors are generically referred to as gene trapped sequence vectors, or “GTS vectors” in FIG. 1D), preferably incorporating a multiple cloning site with restriction sites corresponding to those incorporated into the amplified cDNAs (e.g., Sfi I, which allows for directional cloning of the cDNAs). After cloning, the resulting phage were handled as a conventional cDNA library using standard procedures. Individual colonies and/or plaques were picked and used to generate PCR derived (using the primers indicated below) templates for DNA sequencing reactions.

[0283] Total cell RNA isolation was conducted using RNAzol (Friendswood, Tex., 77546) per the manufacturer's specifications. An RT premix containing 2× First Strand buffer, 100 mM Tris-HCl, pH 8.3, 150 mM KCl, 6 mM MgCl₂, 2 mM dNTPs, RNAGuard (1.5 units/reaction, Pharmacia), 20 mM DTT, RTT-1 primer (3 pmol/rxn, GenoSys Biotechnologies, sequence: 5′ tggctaggccccaggataggcctcgctggccttttttttttttttttt 3′, SEQ ID NO:1) and Superscript II enzyme (200 units/rxn, Life Technologies) was added. The plate/tube was transferred to a thermal cycler for the RT reaction (37° C. for 5 min. 42° C. for 30 min. and 55° C. for 10 min).

[0284] The cDNA was amplified using two distinct, and preferably nested, stages of PCR. The PCR premix contained: 1.1l× MGBII buffer (74 mM Tris pH 8.8, 18.3 mM Ammonium Sulfate, 7.4 mM MgCl₂, 5.5 mM 2 ME, 0.011% Gelatin), 11.1% DMSO (Sigma), 1.67 mM τdNTPS, Taq (5 units/rxn), water and primers. The sequences of the first round primers are: BTK-1 5′ gccatggctccggtaggtccagag 3′, SEQ ID NO:2 (GET-2, 5′ tggctaggccccaggatag 31, SEQ ID NO:3), (about 7 pmol/rxn). The sequences of the second round primers are BTK-4 5′ gtccagagatggccatagc 3′, SEQ ID NO:4 (GET-2N 5′ ccaggataggcctcgctg 3′, SEQ ID NO:5), (used at about 20 pmol/rxn). The outer premix was added to an aliquot of cDNA and run for 20 cycles (94° C. for 45 sec., 56° C. for 60 sec 72° C. for 2-4 min). An aliquot of this product was added to the inner premix and cycled at the same temperatures 20 times.

[0285] The PCR products of the second amplification series were extracted using phenol/chloroform, chloroform, and isopropanol precipitated in the presence of glycogen/sodium acetate. After centrifugation, the nucleic acid pellets were washed with 70 percent ethanol and were resuspended in TE, pH 8. After digestion with Sfi I at 55° C., the digested products were loaded onto 0.8% agarose gels and size-selected using DEAE membranes as described (Sambrook et al., 1989, supra). Generally, six approximate size-fractions (<700 bp, 700-900 bp, 900-1,300 bp, 1,300-1,600 bp, 1,600-2,000 bp, >2,000 bp) were separately ligated into GTS vector arms that were engineered to contain the corresponding Sfi I “A” and “B” specific overhangs (i.e., TAG and GCG, respectively). The ligation products were packaged using commercially available lambda packaging extracts (Promega), and plated using E. coli strain C600 using conventional procedures (Sambrook et al., 1989, supra). Individual plaques were directly picked into 40 microliters of PCR buffer and subjected to 35 cycles of PCR [at 94° C. for 45 sec., 56° C. for 60 sec 72° C. for 1-3 min (depending on the size fraction)] using 12 pmol of the primers SEQ-4, 5′ tacagtttttcttgtgaagattg 3′, SEQ ID NO:6 and SEQ-5, 5′ gggtagtccccaccttttg 3′, SEQ ID NO:7, per PCR reaction. The cloned 3′ RACE products were purified using an S300 column equilibrated in STE essentially as described in Nehls et al., 1993, TIG, 9:336-337, and the products were recovered by centrifugation at 1,200× g for 5 min. This step removes unincorporated nucleotides, oligonucleotides, and primer-dimers. The PCR products were subsequently applied to a 0.25 ml bed of Sephadex® G-50 (DNA Grade, Pharmacia Biotech AB) that was equilibrated in MilliQ H₂O, and recovered by centrifugation as described above. Purified PCR products were quantified by fluorescence using PicoGreen (Molecular Probes, Inc., Eugene, Oreg.) as per the manufacturer's instructions.

[0286] Dye terminator cycle sequencing reactions with AmpliTaq® FS DNA polymerase (Perkin Elmer Applied Biosystems, Foster City, Calif.) were carried out using 7 pmoles of primer (Oligonucleotide BTK-3; 5′ tccaagtcctggcatctcac 3′, SEQ ID NO:8) and approximately 30-120 ng of 3′ template. Unincorporated dye terminators were removed from the completed sequencing reactions using G-50 columns as described above. The reactions were dried under vacuum, resuspended in loading buffer, and electrophoresed through a 6% Long Ranger acrylamide gel (FMC BioProducts, Rockland, Me.) on an ABI Prism® 377 with XL upgrade as per the manufacturer's instructions. The sequences of the amplicons, or GTSs, are described in SEQ ID NOS:9-1,008.

[0287] All publications and patents mentioned in the above specification are herein incorporated by reference. Various modifications and variations of the described method and system of the invention will be apparent to those skilled in the art without departing from the scope and spirit of the invention. Although the invention has been described in connection with specific preferred embodiments, it should be understood that the invention as claimed should not be unduly limited to such specific embodiments. Indeed, various modifications of the above-described modes for carrying out the invention which are obvious to those skilled in the field of molecular biology or related fields are intended to be within the scope of the following claims.

The application's sequence listing, which the Patent Office published only in electronic form, follows.

SEQUENCE LISTING (1008 sequences)

SEQ ID NO: 1 - DNA, 40 bp, Artificial sequence
  chimeric sequence
tggctaggccccaggataggcctcgctggccttttttttt

SEQ ID NO: 2 - DNA, 24 bp, Artificial sequence
  chimeric sequence
gccatggctccggtaggtccagag

SEQ ID NO: 3 - DNA, 19 bp, Rattus norvegicus
tggctaggccccaggatag

SEQ ID NO: 4 - DNA, 19 bp, Artificial sequence
  chimeric sequence
gtccagagatggccatagc

SEQ ID NO: 5 - DNA, 18 bp, Artificial sequence
  chimeric sequence
ccaggataggcctcgctg

SEQ ID NO: 6 - DNA, 23 bp, bacteriophage lambda
tacagtttttcttgtgaagattg

SEQ ID NO: 7 - DNA, 19 bp, bacteriophage lambda
gggtagtccccaccttttg

SEQ ID NO: 8 - DNA, 20 bp, Mus musculus
tccaagtcctggcatctcac

SEQ ID NO: 9 - DNA, 210 bp, homo sapiens
  misc_feature (1)...(210): n = A,T,C or G
accaaccaataccaccctcctncaangcctnttcctcctcatanacctntcttactcacatattattttataactccaaactgnctttnttttattttcccctncatgctcatatcacaanatgacactgttatcacattttttcatcagcnnataccctgtnannancctnatattttntcgtncactttatnaaaccaactcactttc

SEQ ID NO: 10 - DNA, 535 bp, homo sapiens
  misc_feature (1)...(535): n = A,T,C or G
actgtctcatcctcctctgcaaatccaacagaaaggacacagtagagtgggcaagaatgcaaagaaggtctgtggtttggaactggcccaagccgaactaaacttttctaaatatacattaaactgtcaacaaagagcaccgtgacccacagcctgaataaagggagagccccaaggccctctgaagccactagttctgtgagttgttttagggagaagacagacaaccaagaattatttaccttattagactgtgcccatccaagcccaggtaaaaccttttgatcagcagaaaactggaattatttccctttctctatcctggattgagtgtgaattccccanaaaaacttggctttgagagcactagctggacatataggggtccattttcaatctgctctgaaaaaggccctgcttcattctaaaagaangctttaaaaaactggtatctaagatctangattgaagatggggagaacctgngggtgancaattggccccantctttctgaagcattatctgaaaaaaaaa

SEQ ID NO: 11 - DNA, 141 bp, homo sapiens
  misc_feature (1)...(141): n = A,T,C or G
gtttagacctggggatctacctncttaaancnaaantgataaacngaactnactntnttnaactctgacatgcgccaacaactaccangaatgannaagtatatttcaaataaactttcctattaaagtgaaaaaaaaaaa

SEQ ID NO: 12 - DNA, 355 bp, homo sapiens
  misc_feature (1)...(355): n = A,T,C or G
atgctcacatcattccatcttcaatcaagtgaatagcaggtggcatttttatgtggctgaaagagaagactaaatcagccaagaagtggggaaactgcccagatggatcatacaaccatgtctatgatcttcctgtttctctgggattctgatatgaggtacgtttctccgcttttctgttttctagaaaattagaattttctataaaatttctatggaaaccatattttccattaagttaggagcctcagtcatcctttgccccactgaagctttgcaggagggagccccagtcgtaggtgcgcctcaaactccttcctcanccataagcactttnacccccccggggccgtaa

SEQ ID NO: 13 - DNA, 206 bp, homo sapiens
  misc_feature (1)...(206): n = A,T,C or G
acgggcttccacccanaagagctcagagcctgcccctcagggctngccaagtgagggtccctggtgatgtctgatgtcctcgtctgcctgggaaggacccagctctcctcgctcagctctagaaggatctatctagttccttgacttagtaaccttctaattgtaccattaaaacaccaccacaaccaanaaggaaataaaaaaaa

SEQ ID NO: 14 - DNA, 196 bp, homo sapiens
  misc_feature (1)...(196): n = A,T,C or G
caactggatcataacagtcatgcaatgatacatcaggaccctcgacctcacaacattttgtctaccatatgcttaaaagaagagctaaaattctataagggcgagaaaganccttcaccattcaccttaccggntacntccttttngggatnttttaaangtgggttgcctctcttttaaaaaagaaagagaaccc

SEQ ID NO: 15 - DNA, 475 bp, homo sapiens
  misc_feature (1)...(475): n = A,T,C or G
ggtccttccataagcttgcatcgtcgttattcatatagtaatcgcccacactatatctagcgatagatttgcatcgtctttttctaatgagcacttccactatcatatngacccacgttgtcgtcatatcgaagtcgtgaactccnattccatcgagacgacgcaacccccagaganntgtaatattcaaaaaacattgagacgtgctatttcctcgtagttcgaatggctagcgacggccccccatttacacnggagtgtagancgtagtatcttgccaatctatcaatagggaaacccagtcggngtacaagaacatgccccctaaggtcgcactctattcaaatacatgcntggatacaacaaactaccaagacggaacatcgggggtagggcatgccactnttgaatcttntntaacgggccntaatgcgncnccctnggaagatataaatacaccttttaaaaaaaaaaa

SEQ ID NO: 16 - DNA, 204 bp, homo sapiens
  misc_feature (1)...(204): n = A,T,C or G
gcttataggtggaagggacttgccttgnntcangcaatttgaaagtaancagattgtgtctaangacataagaattgntttcaagcatccaaatgaaacagtgggaggtgcacagaatattgatttgtatanagttgacttacgttngtggatttttcattcaataaaaacaggttttttttttttaccagccaaaaaaaaaaa

SEQ ID NO: 17 - DNA, 529 bp, homo sapiens
  misc_feature (1)...(529): n = A,T,C or G
attaaagtcagaaactngaagctttcttggaaggaacaaaattccccttcaacaatnttggaagccccctcttggaagaatggcctggccccttggctttctttaataaacttccccttggcctaagggccatggaatggtggcaanggccaggcccctttcggccccaacccttggccccaacaacccctttccccggccccnaagggggtttccttcaacccatggcaatcttcaacttngcggaatctngggggaatccccttccccaacttcccttccnacccttcccatccccaacttggaaatcaaagcgggtcggcccgnaatcaagggnaagccttggaagaaccctggaagaaaaggnccttggtaattaaaagnaaaggccaggaacccaaccttcccccgccggaatttcttggcttggcccccaacntggaaaacctggggnaggaaaattcaattttggaagnttccggggcttgggaattccttcnttaaaaccccaaccccggaaccttccaag

SEQ ID NO: 18 - DNA, 172 bp, homo sapiens
agtcccaggacagcctgggaagtgttggctgcctggtaatggaagaatgtccaggatggaaaacaagaggctggatctgcaaatgacattgtatttcaggggtctgctttcctggtctgcccctccccacctctgtagctccctcacagtgacagcagagctgtgaacccaa

SEQ ID NO: 19 - DNA, 271 bp, homo sapiens
atttgcattacaagaaagactgacggattttaaaccacacctaaaagaaaagaagtggtggcgaataaattgtagactctcccaactcatcatgtagatatattatacaagcaaattactagcagtcttggagaatattcaatgaatgcctttacatgtttgtaagcaaatataaattgtatcagaatgttgagagattgtaattagtggaaataactagctgaaataaaattttaaataacgtgtttctaagaagttaaacaataaaaaa

SEQ ID NO: 20 - DNA, 500 bp, homo sapiens
gaatatagtttccactgtaaacctggcctgtaagttggatctgaagaaaatagctttgcatgcaaaaaatgcagaatataacccaaagaggtttgctgctgtcataatgaggatccgagagcccaggacaacagcccttatatttagctctgggaagatggtctgcacgggagccaaaagttacgagcctgaactgtttcctggtcttatttatagaatggtaaaaccacgaattgtgttgcttatctttgtatctggaaaagttgtgttgacaggtgccaaagaacgttctgagatctatgaagcatttgaaaacatctatcctattctaaaaggttttaaaaaagcctgagcatatcattcagcatctcacattattctggtttgaatatgtccataagcccagcacagaaacagctggattcttctacgtttaattgtagatgttacaagtacgttacttattaaagggcgactctgtgtaaagtaacctaagaaac

SEQ ID NO: 21 - DNA, 148 bp, homo sapiens
gtgaagaatttgctgaaactggacgcatccgtcttcaatgaccctcttaaatccgggcatggggtgaacacaaaggcatctgtctaatatcctggcacaatagacacacaccccacaattaaaaaccccggacgcgcaaaaaaaaaaa

SEQ ID NO: 22 - DNA, 392 bp, homo sapiens
  misc_feature (1)...(392): n = A,T,C or G
acactgtgtccctaggatgttccttgttcggaatccagcctcatcagccatcccacggcccgacagaagcatcctgacatcatcaatccacaananaccanacgtctgctgagcccagaatgaatcagacaagagaaaggttaggcggccagggggagctaaaagcccctaaaagtttaaagagatcctaccaaatgggtggttggctcccacagagattagttttaatcaattattaagcaatagtttaatattttaagagtctgctcaatcacagagaaatgaaaacatttcatgacttttttccctacatcttccaaagcaaaaaatgtaaagcaagtgtacctccagtgacacatttttaaaaaattctttctattgaaaaaaaaaaa

SEQ ID NO: 23 - DNA, 152 bp, homo sapiens
  misc_feature (1)...(152): n = A,T,C or G
acaggtattgtcatggacaaggantnccnaanctactttgagatactngctgctnnccccaaagggggcgatnactgnctggaaacacacnatcacccncaaggaggcttgggcgctgtaacngnccggtcacccctccctgaaagggagga

SEQ ID NO: 24 - DNA, 395 bp, homo sapiens
cactcgtgctgatgaagatggggggcagagtagtcacaaagaatgcagtgtgagtcaaccctggcatctggaaggatctgaactggctgactggagtgaaaagaattcttcatgtctgtaaattattacgaaatgccctgaggagcccagtgactagtcactgagtatcaaacccaggaaagaccacgaaccagcataagttctagatcaaacattgtggtctgtacaagccacacttctaacacatctaggttcaatctgccttcagaggtgccagtggaattcaaaagcatgttatagcacttttcattttccagtgctcctgattatgaaagctcacacatggccattctcctctctgaacatctctgcaaataaaatattattcctatttt

SEQ ID NO: 25 - DNA, 421 bp, homo sapiens
acacccagttcaggtactccgatcataaaatgtgagttctgaagaactgtctagagaaccaatagccactaaaagacaccttaataaagttgaaaaattcatgacagtctcaaaaaagcacagcagggtccttacagtagatgaagatcgcccagcaaaatgtagaagccagctgcttttctggaaataaaaaatggcatcagctttggcagacagtagtgagatccatcacttcctaggacccccaaacaatcttctgaccaaggtctggagaagggtggtcactgagcagcaccataaacagaccacaaaagcgtaccaccaaaggtacaagaggattttcaaatggcgaattatttctacatgcataacaaaccaggctccaaacctcccgtgaaaggactgcctgccctgttttttt

SEQ ID NO: 26 - DNA, 386 bp, homo sapiens
  misc_feature (1)...(386): n = A,T,C or G
actgagtgggaggccatgagagccggaattctcacgagcagcangcggccctgtggccctcagcagagggactgactggaagcagatgtggcacaagtctccccatgcggcttcactgttgactctcaggacatctaccctggggacttcccgcaccaagaagaccctgagtcacatgcttgctgctgtccccatctatgatggctgtaaattccatttgcctgctgctgaccatgaatggaagnctacctgggaccctctcctgacctggagacccacacatccaaatgcctacttggcagctcccgtggatgtttcgtgatcagcattcccaacantgaaatcctgaatgctcttccccaaatncactccacacacggccttcc

SEQ ID NO: 27 - DNA, 460 bp, homo sapiens
  misc_feature (1)...(460): n = A,T,C or G
gatgaagacctggatccttgaaattgcctgcnagacccttttggatctggctcctgcctacctctccagcccagcttcaagtcctctattctgccctgccctaatcctgggcttccggagccttctttcaggacccaaaccctccatactccttccatctcaagcccaacatagacccttcttcaccagcctcactcctcttccatctgctcacttcttctcctctgatggcccatccccaagaagcccccatgaccccaaagagggttacaccacgtatattcccccagctctcactctcttccccaatgatgaaacaccattataatggaaagatcaattgcatcttaaggactgggtatctgccttcccgactanatctcangctntanganggtaanggcagggccantttgccgggtttttctnaaaaanggcccccaaaatttgggtaaaaggc

SEQ ID NO: 28 - DNA, 198 bp, homo sapiens
tcagggccggctgaactggcagatgcagacctgtgaacacaaagggccaactgtccatctcttacatgctttgtggaatggaggtttattcggactgagtatattcatacatgtgatgccgaatttctgaaagaagttctacgtggggtcattcagtcccctgaaatcctattctaagtctggctcacttcaaaatcc

SEQ ID NO: 29 - DNA, 181 bp, homo sapiens
  misc_feature (1)...(181): n = A,T,C or G
ctgacacagacagaaagaagaagacaangacctacatctcttcgaggaaacaattagtgattaggcctctattgctgatttgtatctgaatcgggtgaagaatgtagggaagataatttgtctcattggnttttctgtttttaaatttttattaaaacactcaatgatttaaaaaaaaaaa

SEQ ID NO: 30 - DNA, 295 bp, homo sapiens
atcactgaccctgggagaaggcaactgccatgtcatgaggatacacaagcagcactctggagagatttacgtggtgagaaaccgaagcctccagctaaaagccacatggatgagcttagaagaagattcctccgatcgcagtcaagtctttagatgactacaatcctggacaacatcttgattgtaatctcatcaaggactgtgagcctgaacatctagctaagatgctcctcaattcttgactctcccaaactgggataataaatgttggttgttttaagtcaaacaaaaaaaa

SEQ ID NO: 31 - DNA, 258 bp, homo sapiens
aggctgacccatcaagtggaatcctgtggccaagaagcagctccggcagaaagtcagagagagaggagagtgaggataagcttaatctttgaaacaattaactttgtacctctggctgctgcagctgctagttacttgaccccgagtgtcatacccaaccacaaagcctctctgcttgaagtctgagaaacatctctcaaggtatttgtacatcccctgaagcaaataaacacaaaagattagttctaaaaaaaaaaa

SEQ ID NO: 32 - DNA, 387 bp, homo sapiens
acgtaagctgatgttacttggagatccccagccacagacatgacattgcaaatgggattctgaaagttcaatgatttctacaaatcagcacacaaaagactgaaatggtctttcactctggaagaggagtttaaacacacatatacacaaacatagaaacatacactcacaaaagcaggtgggagacagagcagagagacagcctgcactgagcagatggagcagtgaacatggacttggtgagaactagaatgcaaataaacttcatctatcttccatgtcaactatgttcaactggtagtgactgcttgaagcattgtgttaagaaagattctgaggtcacattctagctcagaataaaaaagtctcataatgaaaaaacaaaaa

SEQ ID NO: 33 - DNA, 542 bp, homo sapiens
  misc_feature (1)...(542): n = A,T,C or G
gtcatcactatttgaactaccgtggaggaagagagacgtgctagaagagacttggagaactgcaactcataagaaggttcctgtggacagcgatggacactctaaccacccacagtcctagcccattggaggatgttttagcacttctttctccacatatgatcacagtgaaattggaggaaccaaattttaccctcagaaggcctcattcctacttccccaaagtaaattagctatttgaattttcatcctttctacataaaaactgtgctgtatctccacctactttttcttcacttcctcctccctttaagaaaaaagactgttttccttgactggacttactcctgggctgatcacctccacctgcatcctccagaacttgcttaatcatctgtaagttcttcatttccactgaatccttctcttctgcctacatataggctcagttctccataaaaataccattaacaacaactggaagagaattttgatcaatcccaacaccctttcaanggatcttggaatggtcctttggtccc

SEQ ID NO: 34 - DNA, 303 bp, homo sapiens
gtttcacttggtctggacatgcgatttgctttggctgaggtatatttgtggaactactatgcccatttcaaggctgggctttaggaagttttacgggtttccacctattttcctgtgccttttccattctgtcaagaacaaaagctgatgctctaaggtggatgagagaacttttcaagcagaagctcccccagccgtcagtgcctatatctaaccaccttcctaatgtacaaatttgctgaaacacagctgacacacagatccttgagaataaatgctcatttttatacaccaaaaaaaaaa

SEQ ID NO: 35 - DNA, 358 bp, homo sapiens
  misc_feature (1)...(358): n = A,T,C or G
ctccccacgcacgctgcatgacaagaagcagcagctgaaagttttgtcttcagaattgaatatgtatgaagtacagagcaaagaatataaatatgaggtagagaaacttaccaatgagctccagaatttaaagaagaaatacctcgctcagaaacgtaaagaacaacttnaaaaaaacaaggacacagcacccatggataacaccttcttaatggtcaaaccaaangggcctggttttactgggggcggattttcctctnaggtcaaccataatgacgttctaacctgangcttgctggntgtttccagntgaaacaactnatgaaatctgctcttgggaccnttttgggggaaatct

SEQ ID NO: 36 - DNA, 342 bp, homo sapiens
ctcaagatcaagcacaaaccaccatgggagcagccacgtctttctttctttgtccctagagcatgggaagagaaagttacccaagcccagcatgtgagctctgcattcctcgcaatgctagcaggaggggcttccagcgtctctacgcaagacaacaggtgaggacatctgcaaaagcctcttgaatctctaggcatactgttgggtcttgctgctagggttacctgcaaatgagcattcatgcttatgtatttccttctcaacacaagttggaaaagcaagggcacatcactttggggagccataaaatattttaaaactacacactcagtattaaatgac

SEQ ID NO: 37 - DNA, 413 bp, homo sapiens
  misc_feature (1)...(413): n = A,T,C or G
gttcacggtcaattgtaaagtccggtctagagagggagaaggacccatagttgcatcataagcaaatccaatgaaggagaccaaaaaacccagaaccagcagaaaagagacccaacaaagaaatgactgttggtgcaagtggaagaagccggcctcacatctccaattatctttgacaatgtgacgttcttcnagcacattatgatcattgaagcataaaatgatgattctgaataacacaagtgaatagttatagtaaagagattctgtttaagaaaacagggaggtaaaattttagggggacacaggttctatcaaaatttaaatttagtttttaatttgtaaacttacaaacaggcatttaatttttaaaaaaagtctgctaatataaactttatttcataaaaaaaaaa

SEQ ID NO: 38 - DNA, 375 bp, homo sapiens
  misc_feature (1)...(375): n = A,T,C or G
gtaactgaacattagagagaatctgcactagtggaaacctttctcagctcatgcttagctagaactcccggaaggtatgtgagaaattttaaatctctgattctggagcccacaaagaagctcaggatttcaactgtcaatgcagcaaattctggaagtccatatggaggtgcctaagattttggtgaatagacggcattcatataaatggctggtgtagctcgctggaatgcttggaaacaatgggcgaggntttaaaaggatttggagtaactcgaagttctggtgagaggnatgctcgttaaaggaatttttttatagctcctagcctctgggatcaaggataaaacaatgnttttcttggaaaaaaaaaaa

SEQ ID NO: 39 - DNA, 369 bp, homo sapiens
gctgtctagaaaaggacaccaacaatcacccatgaagattgcccttcaacctttgggaggaaatgatcaaaatgggagctagagaagattgttgttggaatctcaggaaaaagtcataatccaggccaaagtgagcaaactcccaagagcattcctggtcagcaccgcagcaaatccgtggcaagtgcagagattataagcaatttctccatggctggaattcagttgatctgggactgaacctatttctaatgggctgatgtcaagatgcctgcagcagtaccacgcatcacatccagtgctgggaacatgccaataaaaaagggatccattctcccgtttgctaggtggcaagcatgggtaaatgca

SEQ ID NO: 40 - DNA, 299 bp, homo sapiens
  misc_feature (1)...(299): n = A,T,C or G
ttgggccctaaattgcattccaaagaccctgctcctggaacagccttctgcaatcaacacaacctcttggaggttttactgcgtctggcactcgcaggttcccctgctctcactctctctctctctctgtttccttgctgngaaaaacgtgntgaccatcaggcatatggcagaataattggatttcaggcaagccaatataaggagagtgaagttgaaaggttaagtcatgtgcccaaaatcacagagctgagattggaacacatatctgcccgatccgaaagttcgaaaaaaaaaaa

SEQ ID NO: 41 - DNA, 145 bp, homo sapiens
  misc_feature (1)...(145): n = A,T,C or G
ggggggccatttccagaataaaggccattcnttattnccccttggnggaaccctgggacnggtaccaccaatcccaggaatggggnccgggnttccttggcctttaaacttggaatggaacatttttcncccacaaaaaaagaaa

SEQ ID NO: 42 - DNA, 184 bp, homo sapiens
  misc_feature (1)...(184): n = A,T,C or G
gcaaacaacgggggccttcccatttggtggaaataaccgcccttgcgcccgtaaaaaagaacaagggcccccggaaacccaanggggggaactttaccggaattttcccaagaaaagaaacggggccgggggacccaccggttccttttttgngggggccatttcaattttcgggttcaaaaaa

SEQ ID NO: 43 - DNA, 315 bp, homo sapiens
gtcatcactatttgaactaccgtggaggaagagagacgtgctagaagagacttggagaactgcaactcataagaaggtaccaaaaaatgtcagcgcactagcagaagagagcacaaaagctagcctgcaagcagccaagggctctatctgtggtctgtgttttaacggcagtaccaatgatgatgtgacctccttatgaaatttcctctcctaggactacccacgcctgccccgtctcttccttgcaggtcgattccttacttattgttaagtctgaataaaaatataacaaacttatagataccaaaaaaaaaa

SEQ ID NO: 44 - DNA, 355 bp, homo sapiens
  misc_feature (1)...(355): n = A,T,C or G
catttgttaaaaacgtaccctacaccagacaacatgctagctgctgagacagtgaagacaaaaccaaagacagagaggcgagccaacaattttataccacagtccttcacacacctccccctccatctccagcctgctgaaacacagacacagaagggagactgaagaagtcctgtgcaaacagaagtttaaataaagctaagcagttcagacaagagctaatccaaaccatcacagggatgcatttgtgtggcggncagatcanagccaacactaacatcctcagctcccttgaattctgngaattctgtctgcagaatgtgcttacaaggctgggagacatcggcctgcttca

SEQ ID NO: 45 - DNA, 193 bp, homo sapiens
  misc_feature (1)...(193): n = A,T,C or G
ttaggagcaagttcagcctaggttaagtccaagctgaattggcctcgctgtncatttaaatggccgcgcccttnaggaatngngtatccggcgcgcaacataaactnaanncnatgagggcancttttggtttttaccctgggaagnaaatactcataagccacctctgttatttacccccaatcttcacaag

SEQ ID NO: 46 - DNA, 325 bp, homo sapiens
aaaaactgtgatttctgtggtggcttgtcccctcacttgcttttggagtccttctttgtcagctcagacctggttcctggctgagcctccaggcacctatggaacaaaaaggactcatttgacgtaagggccagtaagaggcagctctggaatctggatgtgaagctgggtagcactctcgaatgatgtagcacccacagactcaactccagagaatgtcacactccacagaggcaccgaaaaagaaatcccatcctgggcctgtccaaaaatcccaaacagtctttgacagggaaaaactcttgtatggggggggaaagggctt

SEQ ID NO: 47 - DNA, 497 bp, homo sapiens
  misc_feature (1)...(497): n = A,T,C or G
aaattaccgcctgccagttcctgcagatctgggccactgcctcgtcactgagacctgccatgcggttttggggcctgcatctgtgaccgtgcttaccatggcattgctgccaggggccactgtttgaactgtcgtgggctaacgagaaaaagcaaaggccaccagataagcagaagatgctgtgagccaggccaagggggtgttgtgacatcattgtccctaagcactggcgaaatcaaatggtctcagcagaagaagggggcgggtagctgagtcacgccttggccaggcaaacttgcatggacgtccctgttgccctgagaacccctccacaagagcagcagagattgagttttacggaaacaatgtcacctgtgtccttgtcaagtgttgttcattttaattgtattggttttgccgtctatgggcttggtttgtaaatttgctttggttttattgnatgagctgtagttggaaggaattttatatcccgcctg

SEQ ID NO: 48 - DNA, 355 bp, homo sapiens
  misc_feature (1)...(355): n = A,T,C or G
gtcatcgaaaccctaactnaagatactgcttccttcctcanctagnacaagggacatgcacctacatgtctatngttcaagaagctggccttggatagccaccatngccggggcaggctngacaacaccgcttgnaagagcatcgaccacctagctcaagccaagcagatctnaccacgttgtataggggatcggaagnaggttgggtgccaccaaacattaccccccaagcctccctttgcctctcaagntttagggcattaaaattccttgcacacaaagnggtgggttgntcaccttaatnggcttatctgtccttgnaagaattcaaaaggccccttaagctttaccccaa

SEQ ID NO: 49 - DNA, 371 bp, homo sapiens
  misc_feature (1)...(371): n = A,T,C or G
gacccagccagcttcaggtgcagtggatatgtggcatccagcacaagccttccctgcagccgtcagtgctgctgttttccagatgtgcgcccattcactgcgtgccagtgctgctgccgcaaatttggaagtttacacgtgcatcacgaagtaaaaatgactaggaagctccaacacaagccattacataaaagctgaaattttgactattcactgatttttctttcaaaagtattgatgaagaaaattcccttacaaccagagccgcattcaatattggaaagaacttgtggataatgcttaggcatttgagaaagtcagaaggttcttattaaaataaacactgggnaataaacttttaaaaaaaaaaa

SEQ ID NO: 50 - DNA, 196 bp, homo sapiens
gaaggatcctatttctcactcactattggatgagcatctccgtcactgcctaacacgctccaccaacatcgaactgaccaactgtggtaaaccagagccaaaccccaaagattaaactcatctctgatgagtgttgcctcatctctgatgtttgtatttcaaacaataaaatgaaggtgcaaactacgagcactgt

SEQ ID NO: 51 - DNA, 591 bp, homo sapiens
  misc_feature (1)...(591): n = A,T,C or G
cagggagagaagaggcaggaggctggcaggattcttccaggtgaaacggagaaactggtcttggtcactgtcccaaagccaattaaaatggctttggccaggacaatctctcctggacatctgtctacaccaaaagtcccaacgtagagctggaagtggtgccttcttcctcacccctcaaggaaagtttgaaggataacagcacttcctgctcttaaagagaatttattacacacatttcttttgcaagacaagtcccanaggccangaggcccttccagctggcggagcagcaacgtttccaactatagaagtggatcctgccccccaccccagagaaaggcagtgtgagtctcaaaaagcaggcactcagcctagcggaagggctcgccccaacccgctgctnacagggtagcaaaggaactgctggtgggctggaaacttggctcaaaaccacaagggcaagcacaaaaccttttttggattctnctggtttatctatcaaaatatgggcattttgcattttactgnaccatacccccttattggtctactataaaatgggntttnaaacatctggaccaaaaaaaa

SEQ ID NO: 52 - DNA, 267 bp, homo sapiens
  misc_feature (1)...(267): n = A,T,C or G
tagcatgtgacatatggangggtgaancntcttaggacatattntgaaagagntcactcctacatactgatcntaaagccgacctccagatnnnatnctggcccatncntgtgnnccatacnnggtgtnntcacgactgtngnggctgnaaccacatcttntgaagatcgagaatggactggtgttaccaggggctgggaaggattgggagtagggggnatgaaanagaggttgattaatgggtacacaatctcacataatgtattg

SEQ ID NO: 53 - DNA, 378 bp, homo sapiens
  misc_feature (1)...(378): n = A,T,C or G
aaacctggacccctactaaacagacctgctggcacgcagagctcagccactaccaaccccattgacaccttgaaatgccgccttctggcacagattcaggtctgcaatggcaggactaccaggaaacaggncgnggaagantcagggggaaaacacacctgnacaccattctgttcccnannccanagggcccccaggnccagtgcacnaagaccagcttgntcccaagacgccccccaatcacccccccttccccatcccacntcccacaantcgtctcaatcccaccctnctgggtaaacggggnaataccccnattttnggtggnaggccctgngacccctaggctttgncccccatcaaattaaatattaaaca

SEQ ID NO: 54 - DNA, 123 bp, homo sapiens
  misc_feature (1)...(123): n = A,T,C or G
ctggaaacttcctccgtggggccaaagcctnaaaatatagccatttctattcctgggggaangccatttattatncaggnncntccatacatcatcatgggaaaactgggaaccttctaaggc

SEQ ID NO: 55 - DNA, 267 bp, homo sapiens
gtatggaatccagcagcagttttcctgggctgcaatggaggccgggtcctgttctgaaacaactaggcatcactccgcaagtttcttaccccttttcactaatgtggagatgccagaagtagaacagccatgttgagtctcacatttaccatgtaaaaaggatgacagagccacctaccagccccggatgtctgctgaccactgactttgttacctaagaagaagaaataaattttattctttgcgtggacccttgaaaaaaaaaaa

SEQ ID NO: 56 - DNA, 120 bp, homo sapiens
  misc_feature (1)...(120): n = A,T,C or G
tttaaatccccactgaggtatggcatccagnagnantnnccntgggctgcaatggaggccnggtcctgtnctgaaacanctnggcatcactgccgcaagttgcttacacccttttcacta

SEQ ID NO: 57 - DNA, 351 bp, homo sapiens
gaagtttgatggcatgtctttatatcatggccatgggcaggacttggaaaaagttttaccactaaagcatctatgaactcaagaaagaaaacactggctatgtacaatgatgactgtgatcttttaaatttatctcaaatagcgaacctaccagtcatagttgttatgaggctaaagtgagatattgtatgttaaagtgctttggaaccacacattgccataaaaaggtaagatcgccacatggtccctggtgcaaacttctgataaagagcatgtgcttaaggaacatgccaacgttacgaaggcacctgggcctgcagcctaattacctggaagaaaagcagaaaatct

SEQ ID NO: 58 - DNA, 107 bp, homo sapiens
  misc_feature (1)...(107): n = A,T,C or G
ggacggtcttgggggggggggcnacccttgggctttttagggtcaggaaacngggggggtcccccccacccnacncttaaatgnggaaaaaccaaggcccccctttt

SEQ ID NO: 59 - DNA, 335 bp, homo sapiens
  misc_feature (1)...(335): n = A,T,C or G
tagttgtgataaatctactggtgaaagaagctgtcctcaattacctgcttctgcttagtatttggctaaagatactatggaaggaagaatgctgtctcctcaaactggtgatcttttgaagctgngtcnaaatattttcaaagcnaatgaactgatttangggaaaaatgctcttcgtgagtgcnnacnttgctctancnatggggatgtttgnatgtgtgngngaaaaaccccgggnaaaacaaaaaccaaactcatctatgtggcagacatattgcatctaaaactttgttttgcaatcaatgataaacnctcattccagatcaaaaaaaaaa

SEQ ID NO: 60 - DNA, 337 bp, homo sapiens
  misc_feature (1)...(337): n = A,T,C or G
aggcgggctacaagcttgctccgtgccnancaatctggnnngcagactgggnttggatccnagnatngtgtaaanannaatcnttnaaagctngccaccactgccagaagatatacagggncncattgnccccctgaaatcctattctaagtctgctcacttcacaatccatgaagaatccgcctctgacatcctcagtgccacattaactagtgcctatgggccggcacagagcatactatggggacactcattctgcaatcaaggaaatcaagggaaaatagaagttaggtcactaatttttttctaacacatagaaaataagaaataaaattct

SEQ ID NO: 61 - DNA, 319 bp, homo sapiens
  misc_feature (1)...(319): n = A,T,C or G
gggggggaggcctacccctgcccttttnaaggtcaagaaacctggaggaaattttctttttcttggtcccggcttggatggggaaccaacccaaaaatggggattttaaaaaagggggacttcaatttcccaaaaaaggaacaagaaaccaagggccccgaggcttcaatggcccttggtaaatccccagccactttttgggggaggggcttgaggggcaaggcccgaatgactttgagggtcagggaagtttcgaagaagcagccttggcccaacaatgggtggaaaaccccttggcttcttacttaaaaaataaaaa

SEQ ID NO: 62 - DNA, 144 bp, homo sapiens
  misc_feature (1)...(144): n = A,T,C or G
catgtgctgaggtgcccacgatgcgcctgactgccaccaggaaangccnanncncccatcccgngaagccatgcaggaacacgaagctgacgtcngcttcgtggccggagcgctgcatgnncgtggctcttaatattttgtgcg

SEQ ID NO: 63 - DNA, 118 bp, homo sapiens
  misc_feature (1)...(118): n = A,T,C or G
tggggatgatattgcagaagaatccagaggaactgggaaagccatctgntacagccaacggctactaagtttaaaagtgactccttttggcacagtggccatgtgaaaaaaattaaaa

SEQ ID NO: 64 - DNA, 351 bp, homo sapiens
  misc_feature (1)...(351): n = A,T,C or G
tttatgtccgataatggagaggggatgattagtaacacagatgcaaaagcagccctgccttgaaccacttctcanagacaagttcaggccaactctgctctgaacacagatccagttccatctcaactcggaataaagattcccagtccaggatgacacccatcccctgggcgaatgccccatgtgccctggaaaaccacatgtgcagttgttgggtgcagtgtcacatggatgctgattggatcacgggaattggcagtacttgaagancatctaggncttaattttttttctagttattttatcaattgccgagagaggagnattaaagtcttctgctttgtgaaaaaa

SEQ ID NO: 65 - DNA, 142 bp, homo sapiens
  misc_feature (1)...(142): n = A,T,C or G
gagatggttacacacagnatcangntganaatganganctgaggtgcnagatttgcagggatgcggctcaccaaancccaantgaatgcctgnctncctaccagcaagcncacagatnatcttcccgctagtaagcctttag

SEQ ID NO: 66 - DNA, 256 bp, homo sapiens
  misc_feature (1)...(256): n = A,T,C or G
aaaattatcctggattattcangtagggtcctaantaccatcacaagtgttcttacaaggaagaggcatgtangagatggnacacacantaaangtgatnatgaanatngaggtggagattggagggatgcggtcanaaatncacatgaatnccgtngancttccacaaggcctcatgattancttcnctagaantcttctntnagtgggagctttgncccctntttattcatcttttnatttcttgaaaccctag

SEQ ID NO: 67 - DNA, 191 bp, homo sapiens
  misc_feature (1)...(191): n = A,T,C or G
ctatgaccctgaaggtgaaattntttacnctctgaatgtagggcattanaatacanancgtcaanaagtgctgtgattctncatntacacatgcttggnnnacagaagccncaganagagaccaccctactctcagnaccactttgatangctcatcttcatanattgacttgaagccacctttctatttc

SEQ ID NO: 68 - DNA, 388 bp, homo sapiens
  misc_feature (1)...(388): n = A,T,C or G
tttggaaaaaccccttttgaaatccctcgcgttattcnggnaantgtacccnnggaccccnagngnaaggnangcncctggnnccttcctaaagccggaacccaaagcgnaaaggctttaaaggccaaagaaggcacgtgtttgaaaggtggtcccgcaagccnccaccgccaaaaaagaaagatcccgcnatggtcacntcaccttcaaggcggggcccaaagaacaccttggngaactcccgggaagggccaagccccagaattatcctcggggaaagaagccnccccccagggaannaaacaaagctttngggcccactnttggcttattcaatccaaaggtttcccggcttggaccnccttggaagtccgggcccggggggaag

SEQ ID NO: 69 - DNA, 149 bp, homo sapiens
  misc_feature (1)...(149): n = A,T,C or G
tcatttaaacgactcctggcanccagaccntatnttccctnnctcaatggngggagaaaattctaatccagaacccgtggctcttcacgcgntcagaaccanctccacntcnatttntncaatttttcagctctcttaacccatcacaa

SEQ ID NO: 70 - DNA, 196 bp, homo sapiens
  misc_feature (1)...(196): n = A,T,C or G
caagaacatttgtaagccnacantgaaattgtatnatatgggtgttaagaaanaccaganngttgcttggtanagaaactgaanagtgtgaatcttgcgggcaccacaatagaaggcaangatgannnanggaggacggctggnattcaatttnctgaaccnactgtgnnccaacngacccagctactgtgacagc

SEQ ID NO: 71 - DNA, 105 bp, homo sapiens
  misc_feature (1)...(105): n = A,T,C or G
caactgacgattttttctgnccgctgtatggnacaacaaganaggcattaataggactnattcaaaagacagaacatggtcgaggngttcgcctgtaatgaccag

SEQ ID NO: 72 - DNA, 357 bp, homo sapiens
atgtcaccttttgtgtataaacacatatcaaacttcatgcaggcaactactgatgtgctacagaaggtcctgacaccattttgaccatcagaagcaagctggctgtctcaagacatcctactcagcatgtgagaatctgtgcagcagccaatgagctatgaggaacgggaaaaaattaaacctactaataggtagcattggaataaagtccattcctttattaatatccttgatttatatatctctacatacccagtgcctagagctagcaaaattcctatatggcatcagtaaatatttgtttaaaaagctaagagatttcttcattcatttaaaaaaggtaagtgaaaaaaaaaa

SEQ ID NO: 73 - DNA, 400 bp, homo sapiens
  misc_feature (1)...(400): n = A,T,C or G
gttgtacaagggtttaaatgaagantttgngatganaaaattatcctggattattcaaggggggnnctaactaccatnacangtgtccttacaatggangaggcagnanngagatgggacacacangnaaaggtgataatgaaagatgggagggtgggagattggaggggatgcggggtcacaanccaaatngaattgccctgcagcttaccatnaaagcccacatgagaagctcccgcttagaagccctntgggagggaagcnttggccctngtccaacaaccnttggattttgnaaccccaggtggaaaacaaaatttgccaaactttcttgntccttncntgggaacttggggaaangtaattaaanttttcntggtttttttttaagcctcaaaaa

SEQ ID NO: 74 - DNA, 138 bp, homo sapiens
  misc_feature (1)...(138): n = A,T,C or G
cagaacatgctctgagggntttggaantgnggcgataccccngcnnagngacaggctnttatgggcaacaagatagatctccaaggagatcacaccatnaantgcttttaacggaaaagatgtgttaactacaaatca

SEQ ID NO: 75 - DNA, 129 bp, homo sapiens
  misc_feature (1)...(129): n = A,T,C or G
cagaacacagacgtggaaaagagtgctgggatncttccataacttntgnntggatcacagagnccgtaaagagaccngtctacctcaanantacttgataangcatctcataatgactgaaagccactt

SEQ ID NO: 76 - DNA, 120 bp, homo sapiens
  misc_feature (1)...(120): n = A,T,C or G
tggccaaatgaagttnaaacncttgtgatnnagtnagctgaggggcgnaaattctttgcaactaccttgtgtcctatgcctcanagttccccnagangngaaaaagacccccaggagagg

SEQ ID NO: 77 - DNA, 191 bp, homo sapiens
gaagagtataaaagaccctttgtctgggttaaatagaagactgacggtgtgatggagtgtgtactgcagttcggctcaccaggtatgctgatttgagctccttctcttctttcttgtatgagccacattcataatggatccaataatggccacaaataaatcctttgcaactcctcacaatgaaaaaaaaa

SEQ ID NO: 78 - DNA, 296 bp, homo sapiens
  misc_feature (1)...(296): n = A,T,C or G
actctggggagctacctgcttaagtncnaactgatgctgattcctgcttaccaccctgtgacggtagcaacgccagcaggaaggagtcaaggaggaaatgcagtggagagaagagagcccgttagtggatctgggctaaatcccaattctaccatttatcagcagtgagacttctcacttctttgagcctcatttttctcatgtaaatggggataactattctttcctcagacctgtgagacttaagggcgataataaatgcagtcattggtacagaagtactgtaaaaaaaaaaa

SEQ ID NO: 79 - DNA, 168 bp, homo sapiens
aagtcctgcttttcatcaagacatttgaagagaaaaagcagccttccaaacaaagactaatttgcaatcctagaagaacattttttaaaaaccactttactatatattgttatttttgcgagacttcttgtttttaaaaaaacttttaattcaccacgaaaaaaaaaa

SEQ ID NO: 80 - DNA, 272 bp, homo sapiens
  misc_feature (1)...(272): n = A,T,C or G
aactgagttcacgcagtggaagaggtggtgagcgaggtggtgggccacnccnaggaggttggagaganggccattaatgacgccctaaagaaagcccaagaatcaggagacagggtggtgaaggaggtcactgagaaggtcacccacaccatcactgatgctgttacccatgcggcanaaggcctgggaagactgggacagtgagcctgcctaccagcatggctggcccttcctgaaggtcaataaagagtgtgaaacgtgaaaaaaaaaaa

SEQ ID NO: 81 - DNA, 518 bp, homo sapiens
  misc_feature (1)...(518): n = A,T,C or G
aaacaggggactgtggcagacccacaaagaaaactccagagatggaaaactatgatcctttgcactatgaaataagctagagcacaactgaatgtctgcttggaacacacnacatncacagaaacatctttaaacacagaaggtcttctccaagctcatctctggtgataggacaacagtgggcctcaagcttctccagccagtagcagaccaagatccggtttcaacaaacttggaactctccaagccctttcctgctgtgaactgatttatttggatccatctgtcagancgtgactgaagagtgtccggccagctagcagcccagctgcagcagatgttgtctcagaatgccctgcgaggtgaggctcatatggattttacctgcccgttccacttgntctccttttgccctcctgggaaagantgggaaaggggttgagaacatctgcatgacccatgagaaccangaaagttaacagggcatcttgggggccacagagcactaaggactagga

SEQ ID NO: 82 - DNA, 542 bp, homo sapiens
  misc_feature (1)...(542): n = A,T,C or G
gggggaagcttaccttgntttaaagtcaagaactggannggggntgaggaatgccattccccaagcaagtgggagggtgtnttttaaaggggggaaacccaaggggnaaccaagggtggaaaccttgggggngangctngntncaaangggccaaagaaaggggtgggtngcttgttttgggaagnttcccttggggggccctttcacccccttggggattggttcccaaagnacaacaacccttgcccaagggggttttngtggggagccaaggccttggagggcnttcttaaagggcccaacnnccncanggaacccgtncttcnanangtcttacccataccccaanggatntcaacccccatttnaccaantcttcttaantgnangnggggnccgaanccccnccaangggngggaaaanggccaaaaggggtttcngggcttcccttggcgtngaatcccccaactnggggggccctttttngggggaaaggggagggaaccaaggacctttntttaactttaaaaatggatttcc

SEQ ID NO: 83 - DNA, 101 bp, homo sapiens
  misc_feature (1)...(101): n = A,T,C or G
agaaatggatgagctctaccangcccaattcaccccancggaaatnacngnccntttgcatatgcaaagctgagnccntgcttatccttgaaaaaaaaaaa

SEQ ID NO: 84 - DNA, 249 bp, homo sapiens
  misc_feature (1)...(249): n = A,T,C or G
tcatcattacagccggaagatngaactntgnagtnttcaaatttacttctaattcttanctgctgcaaagtggggaaactncccannccaactngtctnatgggccccntggggagctgccctnccaaaaatggggnttttacaagctggggaccttatttccctttttttgggccaattanggggcccctttttgcaaaccntttccccncctnaaaancttatgaactccagccctgaacttcccgg

SEQ ID NO: 85 - DNA, 120 bp, homo sapiens
gtatgatgggactaatgcttcacctccaagacatcagaggctgccttgacttccataaaataatcaactgtaggctggaatagtcaaataaaataaacccatctcccctaaaaaaaaaaa

SEQ ID NO: 86 - DNA, 151 bp, homo sapiens
  misc_feature (1)...(151): n = A,T,C or G
ctaatccatttaaagggatggangattgntgtccatggcatcctctgaacctaagatcctaagacgtgtcacccataatctgntcacaccatccaaaagaaaccctgaaggcacaggtgtttctgggctacgtgaggcaaaaataaaaaca

SEQ ID NO: 87 - DNA, 338 bp, homo sapiens
  misc_feature (1)...(338): n = A,T,C or G
ggtgccctccgctatnttngnccagagcgcggtctcaaacttnctggcctctaagccatccctgctctncancctncnagggnagctggaattacangaaactgnagaatcacgctccaagangagatctnctggcgggcctaaagatcacannancaaagcatnaaaccacaagcttgtntcggaggaccgaaactccagctcttcacccagaagaatagttcgtggngctgggtngggctttnangngcccactanggccttttgttattgaagctnttcttttcccaagcgggtccctttttatttgcntaatcananaaatacccacctggaca

SEQ ID NO: 88 - DNA, 474 bp, homo sapiens
atacctctacatgccaccttattgtgactggaactgattgtctgatgcattaaacctgagtggaagatccagctctacagaatgaattactgatgccacactaatgctgagattaaccttcaatactgcctgggctgctccaccacgtgctacaaattagatgacatatacttccctgctccagtgacttgggacttggtcctgtgatttcctttggttaatggactgtgatacaagaaatattaggcaaggctgcatggtttggattgtctgcttgccctcttgtgatttgccatcaaaagaacatgccttagggagatgctggcccaagaagaacatggtgacacatagagcagatgtgaacccagttctaagcctgaagccaagcccagctgaccagcaacttgaaacagggtctccctggctttcctacactcctacgatcaagaaaaataagatgctgggtggtgattc

SEQ ID NO: 89 - DNA, 528 bp, homo sapiens
  misc_feature (1)...(528): n = A,T,C or G
gcccagggtgggatgcttacggccngtnattccaggcacttgtggcactcccctctgnanggannnccgatgttacnnnatcaacattatacnggnctncacngacangccnnnnnnnttcnannnaaaatggaggnattcgcaagcctgattggcnntatggaaggccttattgaggcagaaatggangnanatcncacctgctcttgatatacacagctgatctgggcactgagtgaagtcttatttcctgtctatgaaagcagacacttgaaccantcnctcctttcttcatacaatgtgngcgccctnaatcaaatttgctgnantctggaattcgggacttaagggcngattcttttttaatgtgaatggaaggaaagcatttgaagattgatgcaagantatacatgtttgantanttgcctnannggcccncatttgatttaacataaacananccntttgctttggattatattaaaacatttaccacacattgcctcaaggatttaaaatattttactc

SEQ ID NO: 90 - DNA, 212 bp, homo sapiens
  misc_feature (1)...(212): n = A,T,C or G
ggcatttttcttgtcatttggaantncanctgaatgattgcanccntataaggaatgggaagactattcctctgtagcccccatnctgatntaaagtggattcctctgtgagagcccctgncacaancctgaananntgtaacgaatcangatgttatctanntggaacctngccttattgtaccttggaaatgaacccttcccgagggccc

SEQ ID NO: 91 - DNA, 217 bp, homo sapiens
  misc_feature (1)...(217): n = A,T,C or G
gcatgcccatgtcacctgccttaacgggtnggggagccaatcacaggtggaannactctctgctggagtanatctgattactttctggagcacctngccacaacgctagatgctctatattaatcntgatggttagcaaggctgcacctgntnngggnnncncgcaganaatnttcaccgccgggccaggtcnaacancacacattgcgcttctgaa

SEQ ID NO: 92 - DNA, 362 bp, homo sapiens
  misc_feature (1)...(362): n = A,T,C or G
ttaagtcagaaactgagggcaaaaactntacagaaagggcntggagaggaaagagatgggtcttgaagaagaaacttgccctagggaggacccacaccttccccctgaattccacttccttctggtaccaaaaccccaaacttaaccttnngggcccaagcccanccaaatgccactttnggctnttggaaaagcttggaaatcaaacaacaatctactcctctttatggaattgctccatttaattaatcaagaactcaaaaaaaggaaagcctggcttaaccccccnaagaaaagggnactgggaccccaatttgannctttgcccacaaanttggctttcaaaagcccaaaccactttc

SEQ ID NO: 93 - DNA, 183 bp, homo sapiens
  misc_feature (1)...(183): n = A,T,C or G
atacttgtaattcggacatngatgctgcacgncaccaggccttagnaggaggggnagncaatcaaggggaacctattatgcaccnnncaaatgtaggactntttggagnccntgncncaanctgatctttattanaatgatgacngtnctcatgtgcacacacatggctttgtcctacattgg

SEQ ID NO: 94 - DNA, 261 bp, homo sapiens
  misc_feature (1)...(261): n = A,T,C or G
gggggctccccttggcgtttttanntcctgaaactgtagnaccccgtatngccccgtggagggnncacanannccnttttttggggggccctttaaggggngnggggaaattccaccncnttttaanaaaaggggaaaaaanccttaagaaagaatcccngaagnagcagggggggncccctgggcnaacaattggaattcaanccccctttttaccaaggggcctttaacntttcctnttttcccttggaccttttttta

SEQ ID NO: 95 - DNA, 154 bp, homo sapiens
  misc_feature (1)...(154): n = A,T,C or G
gagaataaatttctgttgctttaaaaaaaaactttngngcgggtncaaccnggttaagnccaagctgantnggcctcgntggccttttttttttntgggactaancggagtctcnctctgtnatgcccacgctggagtgcagaagacatggtct

SEQ ID NO: 96 - DNA, 165 bp, homo sapiens
ggaatcatctgtttacctgagcgaagactgcaaagaagtaacaggcaatatcaaaagaaattgaaaagataatagtatgaagcagaagattgaagcgaatctaaccaaagaaagctcttgtatctaaagcaaattgcatgaattaaatacagacaagagaatgtc

SEQ ID NO: 97 - DNA, 292 bp, homo sapiens
  misc_feature (1)...(292): n = A,T,C or G
gaaaggagcaatcctcaggcccacagccttctacaggtcagtcataggaagaacaattgagtgaaactgaaggaagaggcaaaagtgacttaatgatgataacagtgcctgctctactctgcttctgcagaagactcacttactggacattctggagcattcatacagaatagtgaacccccccccgatatcttccatatcttcccttgctaggcataacagaggatgaagcccactacngtcttgagagcctcctaaaacacaagtcaatttgattagaatgaaaaaaaaa

SEQ ID NO: 98 - DNA, 332 bp, homo sapiens
  misc_feature (1)...(332): n = A,T,C or G
aaggatatgactggaagacagacacctgcaaaccggaaagagagctgncaccaagaacctgactgtgctggcaccctgatcttgaactttcaccctccagnactgttanaaatcantgntganggnttactctacccagnctatggnatnttngttacagcacnccancctgattcagatgaggcnacaaggacncagcangaangcagacttttgnangtgaggangaagaacccgaacctgtatnccaccatgctgacactctganctcagactttcagcttccanaatgctggaaaataaaattatgttgtataagtgaaaaaaaaaaa

SEQ ID NO: 99 - DNA, 147 bp, homo sapiens
ggtctcagtcctgggaagctctgggatgaacatggctcctgagcatagacaccaccctgacagaggctcgtgcgtgttcagcttcatcctcggaactttacactcacgcttgactcactccactttctgtgtctttctttttttttg

SEQ ID NO: 100 - DNA, 347 bp, homo sapiens
gttttcagtgatgttcagagccaacaggaaattaaccagcaagtagaaaattgaaagaagatctgcatcttactgcaggagtcattaaaataaaagcagatttggcaaaatggcaagaaccagaggatgaggatgtaaaacaaaaacttttggagtcattttgccaccaggatgaaaataggatgaagctgacatgacaaaggtgcagcacagttatggcaaaggagctatcctgtaccaacacgaaggagagagtggtaaaggaccccacaggaatggagggaatgatattgacacaaaaatggcaacaagatctaactccagcgtcaaactgaagttacacgtat

SEQ ID NO: 101 - DNA, 490 bp, homo sapiens
  misc_feature (1)...(490): n = A,T,C or G
ggctgttcacacatcgaaaaatgtttgctcactcanaactgtgacccggatcattcatngggatgagaaatgacaccccagcactgggtagctggggctcgaaagggtccctacccccttgttgaatggctatctgnggngggcctgccaganctgcagggncancaagtggaccttgacacttgttcctctcttcagccagatgaagagggcanagagagagcggggaanagncnggcagtttcactctcaccgnggattaagtcattngngngagaanganactaagttnnggcagnccattctccttgcattttcaactgagaaataggtctgatncttngggnntggaaatncccanagaatcccactgaaattttctctgggcatatccttatcctttatgtangggancncctagagcaagttcatttattcacatttaaacatagatttctgaanctcctcctctgcacattgggcgggggga

SEQ ID NO: 102 - DNA, 163 bp, homo sapiens
  misc_feature (1)...(163): n = A,T,C or G
gcagcataaacaccctngagatcatncaantagaggcgagtntnggcagctcattcnncttattgctnagtggtgttccgcggngngnaggggccacnntttgntgaaccggncgactattgacaggcatttgcgctgttttcaanttcgagctgtgctgaac

SEQ ID NO: 103 - DNA, 544 bp, homo sapiens
aagccagcctcacctttaaagcgtcaagccccttcccaaaaacctctcaaatcgcaagtcacctggatcctcagagggctacacgtctcagcctgcctgcaccaccccagaggtccccagtggatggagaatgcctaactgcttgcggtacccagatctcggctgagatttctcccctctgtcctgcaacctgagctgtgtgtggtttagtctaattccttccgagtctgtgcagccctcgctggaaccgattctaagctatctggtgccctctgctggacaactgcaatcatggccaaagtccagtttcccagagtcccagggaagcagaggaaacacctccccagattattttaattctctccaattccaacctgcccctatttgcactaaaaggattccaggtgtgttatgaggtttgcatcatgtggtgagaagaattcaggactatgaactagctctaattcaattaagccccgagctttgtgtcctaggcaaattactcatgtggttcctcagttggaaaaaagcaatgaccaactgc

SEQ ID NO: 104 - DNA, 464 bp, homo sapiens
  misc_feature (1)...(464): n = A,T,C or G
gaggggaggaatctgcacagacaagggccagggttcagacagaagacaacgcccacaccagccacttggatncggaagattcctgtacacacttgcatgggtgtaaaattactaacctggtggctaaagagcacgtgtctgaagagcggccaccaaaaggagccactgctgcaggggtgtccacgcgcgcagggaaagaacggactccaggggctgggtctgctcttggagaatgaggtcgtcaaaacctcacttcgtggggaaagtctgcaaaagacagtttcctgcttttgttcatcgtgggctagtaggaaaccggtggcatcctcccagtngaggaatgattcccagngagggttgtaattgtnggccnaagaatncctcggttggcacccccttggnaatttttcactagcccaccgttgggatttttaagcccanaatcccagggatggatgcccatg

SEQ ID NO: 105 - DNA, 114 bp, homo sapiens
  misc_feature (1)...(114): n = A,T,C or G
caattgtaattcatggtcctnnaagatgctgacaccgctgtngggtngggaacaaanntttaaancccaaaaaggggggggcccccnccccaggggaagggggccttttttttt

SEQ ID NO: 106 - DNA, 307 bp, homo sapiens
  misc_feature (1)...(307): n = A,T,C or G
cggtcttttccaagggngggatccgaacgcgtnatngataaancttttgatgagccggcaccatggggatccggccatttgaacaangatgggattgcaccgcaangttcttcccggccncttnggtgggagaaggctatttccgncttattggactggngccaccaacaanaacaaattcgggcttgnttcttgattgcccgcccgtgtttnccgggcttgtccangccgccaaagggggccgcccccggnnttctttttttggtcaaaagaacccngaacccttgttccccgggtgccccctttg

SEQ ID NO: 107 - DNA, 167 bp, homo sapiens
  misc_feature (1)...(167): n = A,T,C or G
gagcgcctgcgtgactcactaacatgccacacatcacgcaggtatcacgcanttncactctccatctattacagggngtaaggatactggtntgcaacaaaccgaaggggtgnccccccccttnttaaaaccccttntgggggtttttnaaaaggccaaaaaagccc

SEQ ID NO: 108 - DNA, 307 bp, homo sapiens
ataaaattaaatatagacatcaagatctaaatgtatcaagtgggtgcacaaaaggaccccaggagggggaaatggagaaaatttcaggtgcttatgccttcacgcacccttttctctgccatcctgccctcgtcttcactgtctgcccactgagacctggggtcactgctcactttcagacaggaaattgaaagacctttgcaaacacttggtcccatccctctcaacttccatttcctaatccccaaaggccaacgtggaaataaaaagatgctttcatgttgaaggcacctgggaaaaaaaaaaa

SEQ ID NO: 109 - DNA, 185 bp, homo sapiens
  misc_feature (1)...(185): n = A,T,C or G
gaactggctgttaaatatttaccangcacaccacaacttcagcagaactgtgtccagccttggactccaatgctggataaattcaacctcccgcaacagtgactgccagcaagggactctgagaagtgtggaaaaattgagaataaagaatcctctgaaaatagcctttcttaataaaaataaaa

SEQ ID NO: 110 - DNA, 456 bp, homo sapiens
  misc_feature (1)...(456): n = A,T,C or G
aaatgccagaaactgcttgggtggcctgagaaacatcgctgactggtgggactggagtctgaccacacttctggatggcctgtacccgggaggcaccccgtcagcccgtgtgccgggggctcagcctggagctcttggaggaaaatgctacctaataggcagttcgtaattaggcagcttaaaagtttttcctaggcatttatgcaagcctcccaggccattttcagcactcatcgaagactctattcctacatgtagtcccgaagttggaaggcccttgagaacccctaccngatagaaccagaagaaccaaaccgtgaccttgaatgggncttggggcttgnggaacaaggaagaattgggtgctnagcctggccaaacaaggactgaagccaaacagccttgtcccaattaaagggccacaatntgatttgaccggaacaccaagggctgggt

SEQ ID NO: 111 - DNA, 155 bp, homo sapiens
  misc_feature (1)...(155): n = A,T,C or G
acttttgtctcaaaaccaaccaggacaaaaaacccncaggatgtgcctcccaagggcaaagggctttctgcagttcattcaccactgcctccttcacactgggacggtgcctggcatgtagtacgcactcaatatgatattgatcaaagaaattt

SEQ ID NO: 112 - DNA, 137 bp, homo sapiens
  misc_feature (1)...(137): n = A,T,C or G
agcagaaggcaagggangcttccatgagttcttgccatcancancatggaccccacttgnagtgccntgctgccnttncacaaaagcccnncaaaggcgntgaacgctnacataacccatntcagtgagcccttacc

SEQ ID NO: 113 - DNA, 407 bp, homo sapiens
gcagaagaaggagaagggtgaagagcaaaagatacaggctaagcgagactacctcttcttatattttcctgaatgaagccacagccagcacgctctgtctacctctcattggccgggaactaagtcacaagaccacactgcaactgtaagatggaaacggcttctttctgagaatatcctgcgacttcagaatgattactctcataaagcatgcagccacagaggctggacagagatcttcagccttgtgatgaagggaaactgaggggggggcgggctgcagaaaggattcttctccttaacctaatttacattcatctcctcataaagatgatgaagcgagactgaattttatttaattttcatgccttgaaattaaatctctagtccactcccaaaaaaaaaaa

SEQ ID NO: 114 - DNA, 523 bp, homo sapiens
  misc_feature (1)...(523): n = A,T,C or G
cttcagccttgcccagctcctggtggaacttccggtaagggatgctcacagagcacagggtggggagctcccctggcacgtggaaatcacatcacactgttggctggcaactccacttccatgtcaatctggtgccagctccgggatcctgaaatgccctgcatgaatcatcaagggacaaaaagaggagactttccagggactgacgccctcccagccaccgtgggatcccggctactgtgactgagcccagtcatgactccagagtgcttcacatcacatcattctttctcagcatccaaaatatgaaggaactgaacctcagagagaagagataaccctggtcggccagtaaactgtagagatccaatttgaattctcccctctgtctggctccgacacatggggttttcttaactcacactgtgtcacctgcagagtgtttcccttcgggggagagagacccaaaatagtgaaaacgaacagaaaaagnttgaagaagtctgcttcgcacttgaaaccc

SEQ ID NO: 115 - DNA, 463 bp, homo sapiens
aagggaaaagaaaaagtggagcacagaaatgaaagaaaggataaaaggaaaagaaagggaaggagaggtgttctggaagtgcctacctggttcagaaggagacagctgaaatcaagccaatggaggtgtctgagccagtcagagccttggccttgctctgacccacagccacaatccaacatgaagatggttcaagagaccttagaccagggaagtgccttccaaagccaaatacaggagcatgagagaagctgtgtcgtgatggaccgcacccatccttcccactctgtgttctctttgtcctgactttattgatggggtgaggtggacttcttgtaaatccatcagaaagatatctgaagcatacctcggggtatatattaaatctaagaacctgatgtccttttactgctgcccctgaataaaaattatgcatcttgtttccgcacttgaaaaaaaaaaa

SEQ ID NO: 116 - DNA, 500 bp, homo sapiens
  misc_feature (1)...(500): n = A,T,C or G
accaggtacactgcagccaaagacagcgtggttcannncttcttttaccagcccatcagncatcagtgganacaaactgacttntttccctgcactgngacgtgtgnaggaggntatcanntcaantctgctgaatgngtngatatccncttgaagagggnagntcctgaccattattgtcnctactaccctgaanatgtaanaccaanaccacanctgaangaatgcagcatggatccctgcccatcaagtgatggattnaaagagataatgccctatgaacacttccacctctttctcgagctgggaacataatccttggactgcatgttccgtgtcctgtggaggagggattcagagacggagctttgtgtgtgtagaggagccatgcatggagagatattgcaggnggaagaatggaagtgcatgtacgcccccaaaccccaanggtatgcaaacttggaatctggttgattggcccaaggggattgccatggaag

SEQ ID NO: 117 - DNA, 138 bp, homo sapiens
  misc_feature (1)...(138): n = A,T,C or G
gaatctggggcactacctgtcattaagtcagcaactgnaagcnnggagnacaactttnctctacaaagtgnaatttccattgtcattacagatgtaaaaccancacatcnccattgcaacagcatgctgtgtggaggg

SEQ ID NO: 118 - DNA, 103 bp, homo sapiens
  misc_feature (1)...(103): n = A,T,C or G
tgccaccttggctgacccnaggcngcctgcggcangaggagctncnacacccgcctnctnantatganagtccggagaggcccacngatcagagctggtatgt

SEQ ID NO: 119 - DNA, 465 bp, homo sapiens
  misc_feature (1)...(465): n = A,T,C or G
tttaattcactgagcctgaaattgccgagaattatagagaaaaggttcctccctgacagtttggcaaggaatatggaatggttaaggactccccacccttccactccaaccccacttccaaagcctgagatttcaggacctctgacccagcagctccaggtgtctacggagcatctaaatctggatatcccatgggaacttcaaactcaaaatacccaagagagatccattaatattcccttgcgctgacctgtaacacccgaatcacatgcagtagtatttagntgattctactgctaaaatgtcaaaaaaatttgcccagttttatccaaccctcctattattggccttcattatctttcaccaagaccaggcaaattacctaattttttcttggccaggnnttttnttgnttncaaccaaaggccaaaaatttaaaatnggttaaactggcctttgaattct

SEQ ID NO: 120 - DNA, 221 bp, homo sapiens
  misc_feature (1)...(221): n = A,T,C or G
ggcatacacaccaacatnnacaggnactgctacctagattggcagatctnntggactggcgttnctggatcacttcaactgattgcgatggtttggttcttatgtgcccantnaccancngtggtatatgctcnttacctctgcggatgaccatataatgggtaggtatcaacatgatcgaggaagtgggctttantntgccatctaatgtatgctgaacc

SEQ ID NO: 121 - DNA, 371 bp, homo sapiens
  misc_feature (1)...(371): n = A,T,C or G
tggggagctcctgctnantcctgaactgagtcagncactcaggcaaagtgcaaccgagagccaaccatgtgcccggtactttccaagatgccaggataaaacggcaataatatgggattcctgtgcttgaggtttttacagcctgaaaaacaatgacctctgcatttcctactcagcaccgcgtgccatcaacatccaagaaacaccaaaggatggccgcaattgagggactcttctcaatagcatgttcttgtgcttcttcatttaggacacatctcccatgctgggaagtacaagacaaatacgaggagttggcttaccatgctgtatgcacccttcttcttgtgatgatgtaagatgataaaacctct

SEQ ID NO: 122 - DNA, 151 bp, homo sapiens
  misc_feature (1)...(151): n = A,T,C or G
ccctttttttccggcctncnntctcaacncaggggaccatgggtttatanccacttacncattatntntcatgncnaacaccaattctntgatgtnncacacttctttaaccncctcctcaattctttncatgtcttcacaccattcgcat

SEQ ID NO: 123 - DNA, 499 bp, homo sapiens
  misc_feature (1)...(499): n = A,T,C or G
ttaaacacaaaacctgactgaccctctcaanaaacnctgacnattaatacagcaatgtgactccacgcaacaacggcttcacctaggacgtatactatttnacagaatcgngctcggctggtttgcggaacnaangaaangnggnccngnaannntnccnnggnctgnnnnngnnattncttccnctgaaaaggggngncgnctncngatctgctgtcaagctgtatttcctgtcctgtgtccttctaagngaacacnatgccacgcgtggtctacggtnntctttgctccanctccccattcactgctgtatttggngtggatgtctctgcagnatgagctattttaaggagncagggctggaanaggcactgagagagcttctggcccccattcaaggacctcctnctaaacacttntctgggatggcaagtatctanaaaatgctgaagaagcattatggagcttctntgctcttnccaaggcacttcaaagggaa

SEQ ID NO: 124 - DNA, 103 bp, homo sapiens
  misc_feature (1)...(103): n = A,T,C or G
ttgaatgtctggatatancgcttgaatgagggnaggtcgtgaccattattagtcnctactacccgtgaaaatgtagaaccanctccaatactgaaggaatgcg

SEQ ID NO: 125 - DNA, 224 bp, homo sapiens
  misc_feature (1)...(224): n = A,T,C or G
aaaactccaaagtgcttgagaaccacaaaccaatgcttctgaaatcataccttcagaaacacttttagtggctcatcatttccatcaacagtgaactatgcccgaggccacatctgtaaagctttttatggttcctttgacttatttaaatgnattttttaaatcaaaattttacttgtaaatgtgaacatttatgtatacatattgcatttcaataaaatatt

SEQ ID NO: 126 - DNA, 181 bp, homo sapiens
ctaaggtcacacagcttactaaagcaccatgagaaataccaagaagagcaagctatgggtctaccctcaaggaactgaccgtcaaaaggacacatgtaagagcctcacgttaattcattcaacaaacatttcgctctgcagggctcccataaatacactctctcaaccctaaaaaaaaaaa

SEQ ID NO: 127 - DNA, 326 bp, homo sapiens
ctgttgggagaatgaaacacaaggaaagcccaggaccagtaccaggcacagggtcagtggcgacagcatgtcaacaactcccctcccttctgcgcctggagattcctctttctccttcaatacatattttgaaatgatatttattaacataaaaattataaaacctttcaaacatccagaaaaatataaggaaaaataccaaatatccatgttctcaccacttggatttaacacatgtgaacatttgccatgcttcagatcctccttttaaaacaaaattgtatgacacagcaattgatgaacggatcatcagtacaatggactgt

SEQ ID NO: 128 - DNA, 221 bp, homo sapiens
  misc_feature (1)...(221): n = A,T,C or G
tataagccaaacctgagggcngggctgccttcngaattctcctacaaaaagcagnggccaggtcgtatggtccttacattccaggaaatngtaaagctcttcaaactcttcaaattataaaactcttctcttgaagacaaccccttttcttggcaaagagcagtagaagactttcttcatttaaaatcttacaggaaatccctgtgttcgaaaaaaaaaaa

SEQ ID NO: 129 - DNA, 287 bp, homo sapiens
  misc_feature (1)...(287): n = A,T,C or G
ccctcccatcatggagtctgccanatcgctcttgactgacgcntccagaagagcgtgcnttcccanngnganncatgccttaggagtatgtgattccctgncactctttcactatnantacantattatncggtgctgntaagtanttatgcaacaggtgagcatgagtagtgctctcggaagataatgaactgcntcgatactgagacatcccataacgcttgcacccacgtatcgtcccgatgccacaccacatacacctataatagaccggtgcaataatggta

SEQ ID NO: 130 - DNA, 270 bp, homo sapiens
  misc_feature (1)...(270): n = A,T,C or G
atctgagttaaacaagacccanaaagcatntgactttcaagatttgagtttcatgaaagctgntttttactcaccacactcccacgatggcatctttttgaatttgttgcaatttcatacaatatgactggatgtaaaaagtgacgctgtccattccccctgtgacacacagngtctgcgtggggaaatctgnctgaatnaagggatctacaatcnatgccacattgcattttacatgcaatataaaccgtttgaatatccaaaaaaaaa

SEQ ID NO: 131 - DNA, 228 bp, homo sapiens
  misc_feature (1)...(228): n = A,T,C or G
cttacccacggctaatatcataagcccatganatgctggggacgacactcactttnaattntntacttgaccactntgaaaggcgaccaccctnannacacngtannntganggaataacaagcagcatntgnatnnttnanttaacannccaaataacatcccaggcaagcagccangcattcagactacccatcatgtggagtgaagacacctccaggatgattcc

SEQ ID NO: 132 - DNA, 167 bp, homo sapiens
  misc_feature (1)...(167): n = A,T,C or G
attacccttttggagacaagttcagcctggtttaagtccaagctgaattggngnncgnnttggacacttncaaatggttgcgccctcgaggnaattnggtatccggacgcgccattttaaanatggccgnttatggcccaattctttngcacatttaccctgggaag

SEQ ID NO: 133 - DNA, 297 bp, homo sapiens
  misc_feature (1)...(297): n = A,T,C or G
tcctggaaatggcttcaaaacatgactgaaatctccttgaggagcataatgtggagggtgggccctaatacaatcttgnttntttaagaagagggaaatttggacaccaaaaaggagacaccangggccgtatggttcnccagaaaaaaagatcacgtgagggcnccagaaaagggttttgtnnacccaggaataaaaaccttcataagaaaccaaaacccnccnaccccttgatacttgggacttgtaggctttccancaaattngngagggaaataaaatttctggtttaaaagc

SEQ ID NO: 134 - DNA, 191 bp, homo sapiens
  misc_feature (1)...(191): n = A,T,C or G
ttgtatgatgtgcactaattgcttctnagagggggaggatcnnaatggnctcatcacgctcttaaaggncctagcttcttacttctgttgcnatgaccactgtgccncntgtantttntaganggggaccatcattcaccctcatgganttangcttactgggggacncccacctaaatgttaatgggcct

SEQ ID NO: 135 - DNA, 541 bp, homo sapiens
  misc_feature (1)...(541): n = A,T,C or G
caagaatcccatggaatggtggcaagtttcttctttgggaancaaggccgccttgggctttgttgccttgggttcacttaaccttttncaacaaaagttaccttccttgcccaaagnaagggggcggaacanaaggtttcaaagcttggaagttaantgggggggaaaaattggaaaagggaaactttcttggcaccaaanggaagccttgccccaacctttttgttggggggggggaagaaaaaagttgggattggaaaggaaggggggccttgaaaaaaaaaaccttggatgggggccaaaacccttggggattggaagnaaaccaaggtgggacccaagccaagggtgggggaccttttnccaangggaagttaatggccttgggtttttttccccttggggccacccttcaattcaacnttggttccaattggttggccaaaattgggaaccttttcnttttttnccaaanggggcnttgggncccccaaaaaaanccccgaaancccnttttgaaaaaacccaaaaaaaaaccttt

SEQ ID NO: 136 - DNA, 222 bp, homo sapiens
aaaaacgtttatgatctgaagatatggcccaaatcaccaaccacgcaatttgttttctgaggaaaggaaagacctggtgcaactttatacaaagagcccatcattcatccttgatcagggatattttctcctcccagccactaatctgctctctgctcttacatttgtacatttttagaacgatattaaacatctgaagagtcattcagggaaaaaaaaaaa

SEQ ID NO: 137 - DNA, 328 bp, homo sapiens
  misc_feature (1)...(328): n = A,T,C or G
aagggaaaagaaaaagtggagcacagaaatgaaagannggatcaaaggaaaagaaagggaaggataggtgttctgnaagtgcctacctggttcaacaangagacngctgaaatcaagccantggaggngtctgagccantcagagccttgngcttgctctgacccncatnctctatccaacatgattatggttcatgagaccttagaccaatggaagttgccttccaaagccaaatacaggagcatgagataaagctgtgtcgtgatggaccgcacccatccttcccactctgtgntctttttgtcctgctttattgttggggtgagg

SEQ ID NO: 138 - DNA, 463 bp, homo sapiens
  misc_feature (1)...(463): n = A,T,C or G
gggggggaccttccccntngctttttaaaagttccagnaaacntggaananangggggggggtttttcnnncccnnttgttttngnccccaagggccttngggttctttccgaagccttccctngaanccttcaaaagttggaatcntggcccttggccctttcgggcccctccccaaaaagtggcttggaagaatttaaccngggacattggaaagccccacccgtggccccaagcccaacaagaatggtcattctttggaaacaaaggaaggaaaacccaggaataccnaaaaggaagtaccattcaaatttcttttattggaatttccatttttattaccaaaaaatttcaaggaaaaaccaagggccaaaaaacccaaatcccttggggtgggggtaaggaaggggtcaagnacttaaattaaaaaattggcccttttggggtacccaaaaataaaaaa

SEQ ID NO: 139 - DNA, 139 bp, homo sapiens
  misc_feature (1)...(139): n = A,T,C or G
gggcccatccccattcctanggnggntgaagtcacgcatggaatttcccattctccccatttgggcccaaangcccgattgggccattcggtcttcaaaaancaaacttttttggacttggggaaggaagaaattcacc

SEQ ID NO: 140 - DNA, 293 bp, homo sapiens
gatgcttccagccactcagtttactaatctggagagatgattaatgtcagagactctaaaacagtaaaacctcagacaccaaattagatataaatccatctgggtaatataaggacttcacgtataaaaaccagatggaagtttggatggattttctctgtgctatatgaggaagaaaggagaaaggaagaggaggagcaacttctaattaatttaaaattccgcagtgaatccacctctctatgtaattaaaaatagaatacaatactacttcaaaaatattaaaaaaaaaa

SEQ ID NO: 141 - DNA, 156 bp, homo sapiens
ggagacttggcaaaaagtcagcatcaggaacaagaggaacaagatgacctgctttacccgatctgaagccctgcagaggtggactttcttcaccccaaaataactctcatctttagcttgataataaaatgaaactttagaacaaggaaaaaaaaa

SEQ ID NO: 142 - DNA, 150 bp, homo sapiens
gcctatatggctgatgctcagtaagcagtgagatgagctgcaagatgagtcaggagccagctgatatcagacctttgcaggacacagaaagatctggattttatcctaaatacaaggagcgtccattaaagaattttaaacaaaaagaaa

SEQ ID NO: 143 - DNA, 310 bp, homo sapiens
atgttctatgcaggtcagctgggatcatgttcctgctttgtcatcatcctcactccaagattcaagataacagagctaccactgcctggaatatcactggtcacaatgacacaggaaaaccacccactgcttcttaaagcttttgcctgatctagcatcatacttatttggaatacactggatgtaagaaaaaagaagaatgtccaatgccaacactattgttaacattatataaaaggtactaaccaagagaaatataagagaatgaaaatgagagttaaaaacgtacctaggcataactaaaaaaaaa

SEQ ID NO: 144 - DNA, 120 bp, homo sapiens
atgaatggaatcagaacttcatggcacttgcagaaaatacccacttaattttcaagaagaactctgtaaaagaatgcttatcaacttctccagaataaaaattgggcctaaaaaaaaaaa

SEQ ID NO: 145 - DNA, 389 bp, homo sapiens
aatctaccaaagttgtcttcagcttccacacttggcgaaaatctgaccttcagtctcagtctggaaagctaaagagcaggatgcattcttcaaatgtcacttctggcatccttgaactgatgtatgatcaatgattgcatcaccgtgtaagtaaacatcacaacagcatgacgtcagtgatatgaacaaggcattatatttgaatatctgccgttagtatccaaagactcattttcaaatgtcggtgaacattccagatgtatcctagaatctcctgcatccatcagcaaactatatgacactcaagattttgtcacgtacttaccaaagatgttcaaagatggaatgtctggttattatataacaaagctcagctctaaaaaaaaaaa

SEQ ID NO: 146 - DNA, 334 bp, homo sapiens
aattaacagtcaaaatgaagcaggataattggagacggagccatgcagccgatcatgccatccttggaattattgggcacaccatcatctcttgcttggattcaggatcttggcattgcattcttacagaaaagcctctttgcagtcaacatccacagaaaagaaatagaagcaattgatctgcaaggacctgcctttgaaatattgacacattgaggatttgttcatgtgtggatgtgatggaactgaagtcgctaggttcatgctacctggaacatgagactgtcaaatagaggagcactgagtcaaatgaatctcggagaaatggagctgg

SEQ ID NO: 147 - DNA, 139 bp, homo sapiens
  misc_feature (1)...(139): n = A,T,C or G
gaaggctccacccacacttacttgnctagagncagncatgcnggcacagcctagtgcaanggaggctgggangngtggtttnaggataccatgngaatgcaggaaatgnntaagaaaaaggggacctgtttgtgacatt

SEQ ID NO: 148 - DNA, 344 bp, homo sapiens
  misc_feature (1)...(344): n = A,T,C or G
gtctgacaaacaccattttcggccacagctgctgtcagttcaaaagtttggctctggggtctgaagaccaaagtctgtccaaggctgatcaccttctgagaaagactcttaaattctgtgaagagtctccagcagaggagacattggtttaaaaaagcaagaagaatcaccacaatgcatgcccactccacattaccaagcctgcacaactcatgttaggggatgtctgctgctcctccagctttctcccctggcaaatacagtggtggtccctgagtccccattagggcccaacagcaggaccagtagcagcccctgtcaganaaaccacagccaggtgggga

SEQ ID NO: 149 - DNA, 326 bp, homo sapiens
  misc_feature (1)...(326): n = A,T,C or G
caaccaccgggcctcagccannangnacggngtggcacacggcttgccttacncaccagatgcccattctcttacaagttttatttggnccgttaanaaacangantaagtnattggttggntccntctttantaaacctttttanaaaanaattctnttacccctttttggttagcaattaantccttggcntttcaatcaaaattggantggggnttttncccaaantttttcaattcccaatttgttccccctttaccaaaaaagggnaccattgggaaancttcccatttccaacctttttttttaattgggggctttgcca

SEQ ID NO: 150 - DNA, 339 bp, homo sapiens
  misc_feature (1)...(339): n = A,T,C or G
ccccccccgtgagggtcattggnctaaacatctagngtttggnnacaggncacaccacctaaagtttcctcctatgtgccacctgngggatcacccctccacccnttnnccnntttgannnggccnnaancntntgcttttcaccccccacccatcttgcanatggggtgggcgacctnttttcaagttctttgggatnggggatnaaaaatgggttaaaaaaaaatcaccaaaccccggaccacattctttaaattcaattccccttatggattttnttcaaacagggggaaaaaaccgccttaccctgggttatttgggtcaaaaaccttttttttc

SEQ ID NO: 151 - DNA, 515 bp, homo sapiens
aactacagtctggggcagcaagaaggacccctaaaggtcactaagagtacatagagatggagaaactgaggctgagagaagcgaggagactctcccaagactccaggatgcatcagccaaggagcagagaccagtgccctgatgtccgacctgttttctgtccactacggcatggggtcctggcctcactatctgtccatgggctctttctctccattagaggtgaagccctggggacaggatctgcactttctacagaacccacagaagccatgcagaggccaggcctttctcccccgcttccccttcctctgcctccgcctctgctctccctggctctgagtgccgcggaccctcctgcccctcctgccttctgcttgctggcctggcctggctctgccaggccctctttcagcacctgcacccctgcagctttcaactgttggccaagtgttgtgctgtcaccaaagttcgaaacgtggctacactattttctcttggtctgcccgctttcc

SEQ ID NO: 152 - DNA, 372 bp, homo sapiens
tctatgcagaatgaaggaagtgccagccgttagagcacttctaaattaaggagccagtggcaccaacacatctgagagctgcccaagataaagtgacgcatcccagataaccccaaaggagaagctggcacgtggcagacaggcacccggcacctgcgactggagcacacgtgtcatctcagagagagtgcagctgcaccgagtgtatcttttggattccttcacttgcattggccacccgtgagaaggggagtttacaacgacccggtaaacccctccctaagtgactgtggaccccctgctgccctgccctggccaaggagacaaggaccccgagaaagggatggagcaggattcaggggcgttatcatc

SEQ ID NO: 153 - DNA, 326 bp, homo sapiens
  misc_feature (1)...(326): n = A,T,C or G
gtcttttgctctagttccctgggatcatctccatgaaaatctagatgctcataagtgctttacttcaggggcttttatggaggagtcaggggatagagaggcaagcccgccatctgctaagtcccaagtctcaccaagagtgtgaaaaacaatgatagcacttaattattgcccacttccaagatgtcaggtgaggagactgagactgaatcaacggagaagcagaggaacttgcccaaccaggttccatggctcanacttggtaaaactggaatttaattcaagcgggcanatttngntctgnccccggaaacatggcctccaca

SEQ ID NO: 154 - DNA, 434 bp, homo sapiens
  misc_feature (1)...(434): n = A,T,C or G
gctccagtccctcatgaagacattcattcaacgaataattcactcaactacgtgcaggagacactttcatagatttacactctgacagggaaagactggccaggtccacaaatgacatcatggcagacacacagagcacgggccaggcactcagggacccgcaacctgttcacgggaatgacaataagagacagagccaaatctggtgaagcaaactcattcaggaagactggcaggagggaccagccagcctccgagagaaaggatgtggatggcgtgtcacagtgggaagagcctgggaccagggtctgaaggccactgcaaggggacccttggcaanttacttgtcgctnaanccaaggtttttttttccataaatgagggactggaaacagctgatttntaagttcctttcaggtttcatgatgaagttt

SEQ ID NO: 155 - DNA, 514 bp, homo sapiens
  misc_feature (1)...(514): n = A,T,C or G
aaattccaagtaaggagatgatcacccaggaggctctagacactccaatacttcctgaccacctaacccacagcacccacccgaagcttattgcaacaggtccaggctctgctgatgacaaagttctcagtctcttcttcctgctatcttcatgcccccacccactcctcactgaaaaaccttcccagagtcccctcccaagcacctactcaaccagcagcaacataaacccagcacagatcctgcaccctagaggagcaccgttcaggacaggctttagggttgaagtggcaggatgtgacagaggcccagtgcagatggaggaatcgacaataggaagagggatgctgctgaagatggctgcaggggtcaagcaaggtgaatggggaatgttatgtgctgggcagtaggcaaacccttctgcttcctgctaggacctacagtgatgacaaccgtgtgtatactggccctctatggnctgcatgtgccatggcccactggagccctctagggc

SEQ ID NO: 156 - DNA, 365 bp, homo sapiens
gcaccaagaaaagcctcattgtgggatctcctcttgaaggtctttagggctctcctggggatatgcctttgctgagcccttcctatggggacagccctacaactatgcccaagtctactgggcagagaccaccccacagcccagaggcagggcacatttgtctccccattgctaatgcctgaggatggaaaaagcaattctctccaaaggtcctgagccaaagggtcttcatgatggagtccctgttggttctgtctctgccatgcccagcccagggtacactcagaggtggtcccagtcttcaacatgctgatctgcaagcaagtgcctactgctgacacaaacaactgttatcacagaaagta

SEQ ID NO: 157 - DNA, 199 bp, homo sapiens
  misc_feature (1)...(199): n = A,T,C or G
ctggggggggaggcttaccttggcattttaaaggtncaggaaacttggagccnttttctttttggaatnaaatanttttttcatnggggaatatgggtcaagggcttnttggagncccnaagctttaagnccatttantattttcccctgngggggncctgggncgggttacaattttataaaaaggggcccgggaggt

SEQ ID NO: 158 - DNA, 372 bp, homo sapiens
  misc_feature (1)...(372): n = A,T,C or G
gtgttttgtggctgtccatcgggggcgaggtcctggatatcgttctgatactgacaagcgccatcctcctgggctccagagtgagttgtcgcagccctgggttccactggctcagggtggatgccttggtagccatcttcatggtgctggcagggcttctaggcatggtggcccacatgatgtacacaaccatttttcaaatcactgtgaaccttggaccagaagattggaagcctcagacctgggactatggctggtcatattgggaatgaaatacactggagagagacttcgctgaattcgctgntgtgaaaaaacacctgtgaacactgtggctgaggatgccaaagaagaaataaacttttaaaaact

SEQ ID NO: 159 - DNA, 148 bp, homo sapiens
  misc_feature (1)...(148): n = A,T,C or G
cctgggcttcaagcaatcctcccacctcggcgctccaaaaggtgcttggggatttacaggcggtgtagccactgntgcccagccagtcaanggacttttttgaacaatntaaatggaattgttatttcattatcccacttcccttgga

SEQ ID NO: 160 - DNA, 320 bp, homo sapiens
  misc_feature (1)...(320): n = A,T,C or G
tagaactgaggctcacagganncaggaacacaagaaaatanangacagatccaggaaagaggaagaagagnggcnaggnaggaagttcaaagaactggagaaagggtggggaagaaagaggatctcccaggtctcaccttgcaatatcaagtttccttccagaagtgaagttaccatcagctgagagaactccatcctgggacatatccgtgcacatactggnggtgaagaatgaagtctcagttttgtgtcaatgaatggcctgggacttagaggtttaagccacctcattaaagttatgttaactttaaaaaaaaaaa

SEQ ID NO: 161 - DNA, 117 bp, homo sapiens
gtctaaagatgaaggctgacatttagagcttgtgaatacaacttccacctccatctgtaagcagaaaatagttcattaaataaaagtctgtcggtagtacagcttgaaaaaaaaaaa

SEQ ID NO: 162 - DNA, 417 bp, homo sapiens
atgaagacgccaaggcaatgacacctgacagtcatatagctgataaggaacagcgccaggacccagagccaggcagtgtgactgagcaagagtctgtgcttttaacaactaggttttgctagcccaaagcacatatttgatacacgtcacaacaaggaccctgagcacatgacagggtggtggattctgggagttcattccctgagcacctactatggaccaggaattggactagattctgagaatacagtattcaagaaaacatatatgacacttgcatacttcaagcttgtgatccagtggagaagagaaacattcaaggaacattaacacaatggtatacattacaaaatgtggtaagtgctacaaacaagatgctatccaaaataaatgaatgagtaaaatatttaccacagg

SEQ ID NO: 163 - DNA, 509 bp, homo sapiens
  misc_feature (1)...(509): n = A,T,C or G
atgacctcagcaccgcccctcctgtgccagatgacggaagggtcctggatcctcgtgggcatggctgttcaagggagccgggagctgtttgctgccattggtcctgaagaggcctggatctcccagacagtgggagaggccaacttcctgccccccagtggctccccacactggcccactggaggcagcaatctctgccccccagaactggccaaggcctcgggatccccgcatgcagtctacttcctgctcctgctgactctcctgatccagagctgaggggctagggtcccagcaccacttcccccttctccaccctctacttcccgcccagtggggctggaatgtggcccagccggctggaacctcaagggccccacccaccgagattgcaagcggctctggctaattgggcctcagtgcccgggctattttgaacccagggatccttgggggtgggnggaggagcgngaccaataaaggnggtnaacacaaggccaaaaaaaaaa

SEQ ID NO: 164 - DNA, 243 bp, homo sapiens
ggtgaggaaacagacagcactaagagaaaaagctggaactcaaaaccaaattaactccaaacttaagttttcccacttcgacaagaaaaggaactgcatgtgtttttctgcctcttgcagatgtatgtcataaaagttggatgccttcctttcaagacatttgaatggatcaccaaataattacctacttttctctcacaactcagataaataattaaaaggagatatacacagaaaaaaaaa

SEQ ID NO: 165 - DNA, 302 bp, homo sapiens
  misc_feature (1)...(302): n = A,T,C or G
gacactgtgacggcctngcggcacagaatgcggcagaagtacagtgcgggacttctggagatagatgataacagacggcatagcttgctctgctcttgctcttccgggatgcttgtgctgggagcccagatgccataccgtgagaaagcccagactgatgtggagaggccacagtgagaagatcgtacgaagaagaactgagtccaccaaccaaaccagcatcgactgccaaacgcgcaggcgagcgagccttcaaatgattcaagccctaagcctttgagtcttctgctgagacctcaggc

SEQ ID NO: 166 - DNA, 477 bp, homo sapiens
  misc_feature (1)...(477): n = A,T,C or G
attctgagctccatgagataagctcacatctctccagcctccctcatgggcccaggagtattggctcggctccttctagaacagctcacattttttggacagcttctccaacctactccacccacatctatctgctctgaatctaacctaggactccatgtctcagtcaggttcaagatgaagtggctcctgctgcagaccctgatcaacacccagacttttcatattcagaaaatcaaaaccaggtcacagcttccaggagtctatccagcttctgctgatcttgctcagaggactgactggcccacaacatctgctcccaggtcagaccagggtgtccacaaggcaaggtccaggatatccagccgctgtccaccacaatgngaaggggatgacncaggaagaaggaaattngacacccaaagtgacaccacnggctacagatgcataaaggaacaaccatgtgaagacatggat

SEQ ID NO: 167 - DNA, 399 bp, homo sapiens
  misc_feature (1)...(399): n = A,T,C or G
aagggaggctttggttttgtncccanggctgggaatggcaanggcncngaacttcgaacatttnggaacnctctggtttcnnggggtaangnganttttctggtnaacctccttgngtggtcaagcctttggnacgccnagctaangccattcatatttccctggtgaactggcncatattacattccaagangggggctggaaataacttgaaggaaatcacaaaaagaaagtggaaaatgggccttggntcctgccctttaactggaagaaattaccttngggaaaatttctttttngctggggttaatctgggttaaaaacttnccgcacttggagcaccctttgtgancccctggncttntggccggccaaaaaaacaaccccctcttggactgg

SEQ ID NO: 168 - DNA, 143 bp, homo sapiens
cgcctggctgccaagatctttggggattgatgaaccaaagtgaagtatgatatatccacagggtggaatactatggacttattaaaattgacatggcagaataatgatgctatggaaagatgttcatgctgtaaaaaaaaaaa

SEQ ID NO: 169 - DNA, 509 bp, homo sapiens
  misc_feature (1)...(509): n = A,T,C or G
gtctggaggctgggcatctgagatcgggaccagcatggttaggttctggtgcagcccagagcagcaggagctgtgccctggcccctgtcctgaggagctcccactggtcagccccgcctactccagctggaccttgatgcttcacacaaggtgtgcgcagaggacacaggcacttcatggagcaacatacttttgtaaaaaaaatgaattcccttgtaacaaatagagcacggaggcttttatagattaagtaatttgtagtcttcttataattatggcttctaaattacctaaaataattcattcaaggcttgattttagttttgtcttgagagtgtcaactctttaacttgagatgctgtaggatgggggtttcatcttgggattcttttctttggatatggcatttaaantctgatacttatattccctatttgaaaacacatgatcaatgacaataccaatacctgatttgngngcaatacttataatttacaacgaaaaaaaaa

SEQ ID NO: 170 - DNA, 337 bp, homo sapiens
  misc_feature (1)...(337): n = A,T,C or G
gcttatagggtttccctcacaaatattcaagcaaacactcaagggaacctcgctggagatctctggaaccctcctactgctcagctcccacctttcagggcatcccggcgactctttggaccagttgaaccaaagaggatagaggatgaagtccaaattggtaatggactccaggaatctttgttagcagctcttggaagaagatgggaggccaaccacacttttctccgcttattgacgacacagttcaaatcatcaggaagagacattatgggtctacaggtctcctgggctgtgagcagagtcgnagctggcatctgggagaaaaaagaaagaa

SEQ ID NO: 171 - DNA, 348 bp, homo sapiens
ccccggattatgcgtttcaggcgtatggaaggaaggaccgacactctgcttcaaaacctctacatgcctcaacgttcccatttgctttacacgacaaagtcctcatgggccgtatgccagacgtcctgcacacaaacctcaatccgtcgcagagagctgggggcgtcagctggaagtggattacactctccttggcacaaacgactcaggccacaggcagccggtggccttcccctgttaactatggagacaatccctaggcgtccttctccgcccagagctagaaaaatttcagagtcctgatcatgcactatcgctcgaaaacaacttccgtgaaaataaaaaagg

SEQ ID NO: 172 - DNA, 174 bp, homo sapiens
  misc_feature (1)...(174): n = A,T,C or G
cttctccaaagctcatntnttggtggatagggaccaacaagnggggccctcaaagctttctcccagccagttancaagacccaagatcccggntntcaaaccaaaaccttnggnaacctctcncaaagnccctttttccctgcttgtngaaacctngatttaatttttgggcat

SEQ ID NO: 173 - DNA, 129 bp, homo sapiens
  misc_feature (1)...(129): n = A,T,C or G
tatacatcttttatctncttgntctatccctcactccttncctcagctctanggggattttcactcnttnacgttttttagtacncctcnccttaggttctatttcccctccngggttttgaaaaaccc

SEQ ID NO: 174 - DNA, 295 bp, homo sapiens
  misc_feature (1)...(295): n = A,T,C or G
agggcaacacgacgtccaatgaaagaactcttctcagntgaggaccataccanccagctttgagtggacctagcagatggtcacagccacatggacaaccctagctcagctggtaattgaanagccacccaactgataccagctggccattggagtttgagcanancagaaataaggagagngtcttggnccagtagtagatttntnctgnntccggagnantgtntacttgccctctgccaatngggacccctgcagntttaggtgtcnccagncacccccattaatgcaaagg

SEQ ID NO: 175 - DNA, 116 bp, homo sapiens
  misc_feature (1)...(116): n = A,T,C or G
tattcttacctctcctcactcctattccnttatttaactcttttcnctttatacctnntatctctatccntnatncntcnattncgccattaacncacccgcatattacccatatt

SEQ ID NO: 176 - DNA, 325 bp, homo sapiens
  misc_feature (1)...(325): n = A,T,C or G
gggactcaaaattgcanctgtcttctttcnggggatgnctcangnaattgaggaacaatggacgcaccacatagctcaacatcctttccttaaccangtagggcacctnattcacttctcggaggattggaaggagnaccanggaccacggtnggggacctatangccattgnagncangcctacnacgntggtcnccttcngnaaacnccccaagcattgnacctttccctggataccaggtggtnggggatngaagnatagggattaccanggggttggattaccctaattcnaaaccncaaaaaggccaccccccttgaggt

SEQ ID NO: 177 - DNA, 365 bp, homo sapiens
  misc_feature (1)...(365): n = A,T,C or G
tatgtcgaagttcaccttcattatcaggatcaagatcttggtgtccacgaccaggatcatgaccattacgttctggaagatgtacatgagaatgacctgggttatgtacacgatcagtttaacatcagattgttcctgggttttattggtctctgttgaaggttcattgctaggctccccacgctcactgggagtaatggaatcattatgaaaatgcagcttgctttgaaaatttgcttggctccaattctgtcattccacgatgctgtctgtgaagcgcttcagggccatggtcatgttcttcatggcaatggttgcaatgatgaaaaataaatgncagcaaacaaatgaggcaaaaaaaaaaa

SEQ ID NO: 178 - DNA, 354 bp, homo sapiens
cctgcaaaacagactcgatggctgaagcaccaccagcgaatctggatcatgatgtgaccttgaaaatgaaagctgtgtgctgtgtatggtaggatgaaaacatgagactgagtgctcaatgacaacccgaagataccataccatttgtggacagcctacctccagatttcctttacctgagagaaatgggagagaaaaatgctattttgttatttgttgggagaaaagcattgttctatgcagccaatcttacttgtaactgatacagcaatataacttcctcaaacaattcttattaaagatattattaaaacttattaaagataatgcaactcagggcatgagtaacatatc

SEQ ID NO: 179 - DNA, 145 bp, homo sapiens
  misc_feature (1)...(145): n = A,T,C or G
gccctttgaaatggtttctatcaaaacnagagaagncnagancaggagccagnacttgtcttccggggaccagaccccccaccacagtagangtttcaaaggaaggagncagaaggaaggagntgaaagaagaaaaagaaagaaa

SEQ ID NO: 180 - DNA, 127 bp, homo sapiens
  misc_feature (1)...(127): n = A,T,C or G
tttggcaggggaccaaaaacctgaattaagtcacgaggaaacaccaggcaagcccaactgaagaacattctataaaacaaccgatttgtgttctttaaatatatcaatgncatgaaagaaaaagaaa

SEQ ID NO: 181 - DNA, 466 bp, homo sapiens
  misc_feature (1)...(466): n = A,T,C or G
ggaggcagtaccaattcttcatcttcaaatgagaaaaggaaggcttgaagaggaaagagatttagccaatgtaccccagttaacaggtgagagaatctacaccaaagctcaggcctcctgccttctgactctctttcctcttgcccgggctgaaaaactgcctgagcttctgcctgtaatgagctaggggctgggattcaaacttgcagtgagccacttgcagctgtcttagttggcaccgctgtctgccagcaccaaacatctgcctaaatagcggaggggatgtgaccggatgttgccaagagcctctgcagaggtgcaaagtgcagcagcatcagatctctcataacctacctggggtgggacctgggggcggggactgggtacatggagctgggtgagagggggttgttttttnnctnccaaaactgncagagaacatagaaaagcccttgagggtcccaga

SEQ ID NO: 182 - DNA, 124 bp, homo sapiens
  misc_feature (1)...(124): n = A,T,C or G
gattcatgaaatctcggaagcctnaaggccacagcccagagccccagaccctgatgaannncnatanctttttnccctctgatgacatggaangacaaggtttaagggtggcgtcactcgagca

SEQ ID NO: 183 - DNA, 214 bp, homo sapiens
  misc_feature (1)...(214): n = A,T,C or G
catgggcggtttttttactctgtgagaaaacgatacaatacccattttctccgagtgaaaacnnactgtctctacaaagaccangaggaaggattccgccggcctncagttcgccggcctcacctactacatgacatgctgaagctttgggnnacnnccagggaaaaccttcacaanaaggggggggnnctnggcttttggaaaagcctccccg

SEQ ID NO: 184 - DNA, 320 bp, homo sapiens
  misc_feature (1)...(320): n = A,T,C or G
gctggatggactcccagnaatgtcctggactgcaaggggaaacatggtncctatgggacccaatcaagaaaggtggagctcaattttttcttaaaacaatctggtggtttggcccaaccaggggcccaccacccttaaaaggttttccttcctatgggcccacccttggtgggatcaacccttggccctttcaaaaggcttggggtaagcccaaaaagggttcttggcttcccaccccccacccattcttggcaaaaggggggggccaccttttttcaagtctttggatggggattaaaaattggtttaaaaaaaaaatt

SEQ ID NO: 185 - DNA, 125 bp, homo sapiens
  misc_feature (1)...(125): n = A,T,C or G
ttttccttaccaccaatnaactttttccatgcatgggactgccttgctcctttttcccacaaanatccctaaggccccaacnttcaaggaggagaaattttggnggggtggttatcccacctcct

SEQ ID NO: 186 - DNA, 256 bp, homo sapiens
  misc_feature (1)...(256): n = A,T,C or G
caaagctacagaagaagaattcaaaaattaaaaagctggattttcatctattgaatcacaaaactctgacactattattcattggaagagattaccatggttgaattctctggattnanggccagcagccaaaatactggagacctgaaaagggatnactgcntttggnctcctacagcaaccgataaatgtaatataatatttacacaagtcaatctaatagcagttatgctgagcaccatccaatggaaactgg

SEQ ID NO: 187 - DNA, 200 bp, homo sapiens
  misc_feature (1)...(200): n = A,T,C or G
taaaaccccctttatattnattntaaaaaattcccancctcttttgtagacncgnntcancnctancgttttaanttnccanagccctnnaattgcgctctcccctntgccacaattcntttttgccttttttaccctggtaagtaaaatacctcantaagaccaccctcctnttnatttttacccccaatcttcacaag

SEQ ID NO: 188 - DNA, 109 bp, homo sapiens
  misc_feature (1)...(109): n = A,T,C or G
aagcaaaacatcgcatctttccattttataggacaatgccaactcctgaagatcttgctctaagtggtcaaagggtgagcatactgnaggcnacaaaaggataagcctt

SEQ ID NO: 189 - DNA, 395 bp, homo sapiens
  misc_feature (1)...(395): n = A,T,C or G
tgggagctcctgcttaaatcanaactgaaaatntacattatggnccgttgtgctgtcatccgggcnggaagtacaatggagtggactnagcacactgcaagctaanagntttcatgntgacgcaaancntcctggnttatggggacnanagggcnnttactacttggctntgaagccaaacnggaaaaaagtccctatacntaccagggntgggcattcaaccaaaatcatgttgtcccaggaacacncactgcctnnctgngcaccaagctacaccagctctggggncnaaaccntnggaanttanatntttgccctttaaccacngtggaagttttcggntttttttttggaaaaaaaaagtcttttgtttggccaaggctgggaaatgccaa

SEQ ID NO: 190 - DNA, 118 bp, homo sapiens
  misc_feature (1)...(118): n = A,T,C or G
acatggacttggtgagaactagtaatgcagntaancttcatctatcttggcatgnncncgatgttcaactggnagggnctgccttaagcattgtgttaagaaagattctgaggtcaca

SEQ ID NO: 191 - DNA, 349 bp, homo sapiens
catcaaaaaagttttttatcctgtttcttcgggctttgttcctctttcctcctctgcatgatgaagactggaatatagatggactaagacagaagccatgttcaagtttccgatctacaactgactcagtttttcccttgagcacgtaaatatgccaaatttttaggattcaaactgaatatttaaagaaatgtttcttctttgcaatcagaaaggatattttatacaatgtatgggtgcagacaggaagttttattattcactttctcttgtatcaagagaaaccacaacatgagaatagtttttccccctgctttattgaggttatttgacaaataaaaattatata

SEQ ID NO: 192 - DNA, 335 bp, homo sapiens
gcagaaaagataaagaatggaagccctccctccaggggtgcacaccagccaagggaagagatgtgtattttgtctctgggacccagtcaacaaggcctagtgcatgtcaggctctcactgatcagaggggcaccaccgtctcccatggagaaacttgaagaaggactagagagaagtgcaagctgtcttgccagcacttctgagtcattggtgggggttcctacactaagagcagaagtaggaacatgggaaggggaagagagagcttcccctgtagtaataaaaatttaaaaacggcctccatgatgataatccaaaaaactgacaagaccaac

SEQ ID NO: 193 - DNA, 352 bp, homo sapiens
  misc_feature (1)...(352): n = A,T,C or G
gaaggaagataataggataaatcattaattaaaggggctgcatacgggacagatggaattctaaccatgtggacacctcccccaacggtggaggggtaaaaagcaccataaatcactcacggtccagcagtcttcagtagggcccatcttgccccctacaagtaatgataaacaacatatacttccagtgcagcccactgggtattctaaagtaggtgaactatgagataacacatttatccttcttgggaaggnatctcttcatatttcacatggcgcagagaaagcagacccaactgaatgacaactaatgaggattaatgcattattccacagaggattatgggctctt

SEQ ID NO: 194 - DNA, 464 bp, homo sapiens
  misc_feature (1)...(464): n = A,T,C or G
atcccatttaggggaacangcggggatgccaaaccntttanggaagaaaccccgcgccctttanggganccgtagatngggncttgggaaaaatcccnggctggnttggtttatgcccttggncccaaangggaggttcncnnttgcaacntgnttgaaaccccattnanaacaaattntttaaaaantttntgggctctgngnttcgcaacaatgccntttgggaaaattaccgggtaacctcccagggnccttacctgggaagggggattattggaaatttctngaggnggttcncntttnttccntttctnnctcnaattttngggaaaggaacncccctngcnncaaatttaaaaaaccccctacntttttctttcttgggcttgggcattaaatncttcccaaaaaaaaggnccccgggaaaaanggggcccccttggtttnttggaaaattcggcgtt

SEQ ID NO: 195 - DNA, 169 bp, homo sapiens
  misc_feature (1)...(169): n = A,T,C or G
gtctatcatggcagaatttgtcccagaacataaaactacagaacaccccagtttcggtgtgagaaaagagcctaggcatctcctaatttaatgggcttcaaatgggtttgggctcagttgtcctaagccaataaaaanattttgaggtatgtaacctcaaaaaaaaaaa

SEQ ID NO: 196 - DNA, 358 bp, homo sapiens
  misc_feature (1)...(358): n = A,T,C or G
tggatccgggaaggatcccccggatgnggtcccagtttanacggcttcacttggcccangatggaatnngcaaggtggtcttnccangaaagaaagttggaaattttgccnaaagncaaggcccattggttttttcaaggggcaccccaangggattgaaaggaaanttgggccctccgtccaaatattggaaattnggnttcntttttttgaaanantggagggggattttggaaccatatttnttggcnttttaanaaaaaatggggngatggggagggcggcccnttnccncgntaatttttcaangggggaagggaaatttttttttnaaaagccangttttcccaaaaaaaaa

SEQ ID NO: 197 - DNA, 553 bp, homo sapiens
  misc_feature (1)...(553): n = A,T,C or G
gccatcacacctgctcgttcacagaggaggcaaaaaaatgggatgatgggacagagatttccagagtccgtaatcatccagatggtgggccactagaaaagaccagagaaaatgtccagggttggagtgcagggatgagcccagaagatgacattgcaagcaatggctgaacctctgaagattcatttcgtctcttaagggtgtccaagtctctcctctgcccatcaggccccactggaggattctgaacccctctccttcagttactccttcaggtaactgcctgtagtaggttgaaatgtatcgcccagaaaagacatgtccacatcctaaccccggtcgctgtgaatgagactctgttgggaaatagcatctttatagatcataattaaggatcctaagatgagatcatcctggagatttgagacacagatgtgcagaggacagatgaggacagagagagattggagccgatgctgtcacagaccgcagaattcccagctctgccagaanggangngggncctgcttgtcanctggacttcaaacatctg

SEQ ID NO: 198 - DNA, 196 bp, homo sapiens
  misc_feature (1)...(196): n = A,T,C or G
ggcccttattaaggaangangggaaaggaattctttttcttncaccccttggaagaaannacaccaaatggaggaaagggcttggcccatcttgccaagccaagaaaagggaagaagccctcgccttggggaagggtcaagccccattgccttgggccaccccttggatctcaanaactttcccggggccttccaa

SEQ ID NO: 199 - DNA, 322 bp, homo sapiens
taggaagaagtcacccatgactatctggaacaacattgtggggaaggccaagtttctggtcactctccatcttttccgccagtgcccaactgactgatctttacagatggtgtcaacagatgcatttaccctctggcttcaagttgagttggccaatgaagggaggcgctgcggaaagtacatgacatttgcagttgtgggcgactgtgctgtgggatgaaaccaggctcctcatcaagatgaacatagattcaagtctccatcttagccatttcctagttctgtgattataaataaactccttgacttttctgaaaaaaaa

SEQ ID NO: 200 - DNA, 447 bp, homo sapiens
  misc_feature (1)...(447): n = A,T,C or G
gaaactggaaagggccggggggctcccaaggcggnggaatgggangaacgaannttccnaactncacttgntgcntgganaaaaacctggnnnttcaaaanngnggcttcttaccaagnanacccaccagggttggangtggaagcccctgggannggagngggggggcccagctcttcttccttcccaaaaagcttcttttgcttttataacctttttctcattcttgggaaaggntttattggaaaaaanttcacnccatggggggcaatttttnggttttaaaatacaaacttcttncccccaccttctttggggcgtgggggggaaaacctttccttttannggaangcctnaaaagaanattccgnggccttttttaattttgggcccccacttggttgggttngggncntccaaccgncctngtaaaatccccccaaaccc

SEQ ID NO: 201 - DNA, 280 bp, homo sapiens
  misc_feature (1)...(280): n = A,T,C or G
ggcctatgagcagcctgntaccttctgcctcagtgccagagtccatgacaattagtgaactgcgccaggccactgtggccatgatgaacaggaaggatgagctggaggaggagaacagatcactgcgaaacctgctcgacggtgagatggagcactcagccgcgctccggcaagaggtggacaccttgaaaaggaaggtggctgaacaggaggagcggcagggcatgaaggtccaggcgctggccagctatctttgctattttgtgaggagattctaacc

SEQ ID NO: 202 - DNA, 212 bp, homo sapiens
  misc_feature (1)...(212): n = A,T,C or G
gtaactttgggctacttcatgatggcccagatgtctctgatcctgtagtgtggngccctagcctggtcaacgcttggagttttataaccctccatagcttcagtttcttcatctataaaaaaatcatgggnccgtctactagggtttgcaattaatctgggaaaacctttttcttcacnaaccaccaataaagaggatcaaaattaaaaaaa

SEQ ID NO: 203 - DNA, 309 bp, homo sapiens
ggcggtgctccaggtgtgaatggagacgacttcgagctcactgtgctgagaaactgcttttcagagggcttctacagagcccacaggtgagtgagcccctggaggagggggcagctctctccttccaaagctcttcctttatacctttctcatctgaagttatgaaattcaccatggtcatttgtttagtcactctccccactctggccgtgaacttcttaggagctaagattcggctttattggccagtgtggtggctcacgctgtaaccccagcactttagaaagcccgaggtggggtggattgctt

SEQ ID NO: 204 - DNA, 307 bp, homo sapiens
atgatgacaaggaggcccagggcctacaacaagtcagcagcatctctggaagcagaacctcgaactcctggcccccagtccaggatcttcccaccacaccacacactcatggatgaggacttcagctgggtgaagctcaagagctccagctttgcaggccagcatgcaggttcaaatcccagctctacctctcagaggcaggcaacagtggcaggtgactttacctctccacatcttatctcccattcaccttatactgaagaggaatgtggtgaagagaatcagaaagagggatgcttaaggaaac

SEQ ID NO: 205 - DNA, 487 bp, homo sapiens
ctgctcctccagctcggctgttccagtgagcaaaggaatctgtttgtctgagaaaaagaatgtggcagagaggcgggaggcagccccaggcagccccggcagcctcctcagcttcggagctcaccaaaaccagccagccacctcggggagtcacccaagagcctagatgcaggctacagacgggttggttactggttctgctctaaggactggcctgctggactcgctgcgcttctctgccagctgttccctcttccgccttctgtttgctttgatctgaggttgacagaccacctggcctgctaaactgggaaggtagtgatgcattttaggcaatgtcttctgcttatgctcagcaatgcatgagtctcaaagcggtggccagagaaatggcgaatcgtcgtatattgagcgagtgataatgggaatccaggaggtggaaattacaaggttgaaaaagtaaaatcaatgccctgactgtgaaatg

SEQ ID NO: 206 - DNA, 115 bp, homo sapiens
  misc_feature (1)...(115): n = A,T,C or G
ctgatatcagtgaccaganaggtggacttccannacctgctgttatggtggcactcatcactgtcatgngcctgactaattacaggggtgccccaccccccttatacagaactgt

SEQ ID NO: 207 - DNA, 479 bp, homo sapiens
gtcctgttggcacaacctactgacaaccctacaacaaccaagggcctagtctcccttctgttttaagcccatcaagcaagaacaaaagggatataaacacttcctgttccattggaagtaagcctggaatgaagtcccaattccatgccgaggaaccagtgagccccaaaataaagcgatgtctccatatcacatcttgaatcacctccatttccaaccagattcagaatccaatgctcagggataagggagagcgtccagtagtttccactggcctcccttccgtttctcccttattgtctgtccctccaccaggggtatggcctataccagcttgtgaagagctggtggctaaacgttcaggaattttcagaggcgattgttaaatatagttattaaacaattaaatgatgtaacccttccactacataaactatattaaaacaaaggtaataaatacccaaaactcgaaaaaaaaa

SEQ ID NO: 208 - DNA, 324 bp, homo sapiens
gaaacagaacattaattgagcagctaccgtgtgttaagagaacctatcctcgggaattcataattgaaagaagaacatgagctgatggcaattttcatctaacgaatggatctcttacacatcccgtgatcatcaaagaaggagattttatgtgggaatgtcttctgagaacaaagcagaaaaaacactgataagaattactgaacatcaaactatggctcattgcactgattccaatgatattcattcaaaagaggtacctctaagtgaaaagaaaaacagattactttgtctctttcaccatacaactcctcttccaagtcc

SEQ ID NO: 209 - DNA, 351 bp, homo sapiens
  misc_feature (1)...(351): n = A,T,C or G
gctctgggagctcctgatnagtagaactgnattttaaacgacgactacatttgtgcgtgggacctggagcagacggtgaccaaactgacgcggggggagctgagtgccgaggaggtgagcctggtatgtgagaaggtgctggatgaggctgatggagaccatgatgggcggctgtccctggaagatttccagaacatgatcctccgggcaccagacttcctcagcaccttccacatccgaatctgatggcaccacagaggagccgagctataggagggcggggtgacccctcacccgctgtggactctggtttctgagaataaacacaagtcactgagtcaaaaaaaaaaa

SEQ ID NO: 210 - DNA, 472 bp, homo sapiens
  misc_feature (1)...(472): n = A,T,C or G
gctggggtatgtctttatcatgcagcatgaaaatggactaatacangttggaaagttaccaaatctgcagagtctacgaagtttggattggtgcagtccctggtctggaggaaaccactgggagtccccttgtactgcctttacttcttgtgggtgacctgtccaggggtggaaggtgctgcgtctacaggggtccccaaggaccaaggtgctatccatctccctgttcatctcccagagtggnatactcatccagtgcactcatctggagcaattcacatgcaccatgtctacattccagcctgtgggaaagcaagaaaggatgaccaggacacacggngcatcaataagaagatgactataagngntggggtntcattcctctcactttccattggncccaacttanntcacgggancncaacaattaccaaggccatcttgggaaggnaanntctattttgagcaggtg

SEQ ID NO: 211 - DNA, 307 bp, homo sapiens
gaactgcggcccccaactgttatgcatattgaataaagggacagaacagggatgaggtgccctccaatgcatactttgcaaatgtggtgaggaacatgggatgtggcatctgaattgcctgagtccaaatcgtggacccaatgcttcctggctgtgtaatttggacaagtgactgaaccttctgagcctcggtttctctcatctgtaaactggggacagtaatggtggttgtgagaagtacagtatgatgtgcctggcagagggagagagcagttgtgggttttggttgttgtttttaacgtaaaaa

SEQ ID NO: 212 - DNA, 306 bp, homo sapiens
  misc_feature (1)...(306): n = A,T,C or G
gtatcaacccctgataaataccatgcacattagattccaacttttccttccaagacaactcctgaaaacgtccacaaccatagaacttcgatgtcctggaagaatgcagaagaaccccaacaatcaagaaccctaggcagaaagggctatggtatgtggnagagaataagggcagagaatctgacattttcactctcagacacagagactattcaactgtaaaagtcaactggtacacagagccacgctgatgatattttgacttgttaacggagagaagaggaaatagattacaggtaaccgcag

SEQ ID NO: 213 - DNA, 378 bp, homo sapiens
atggagagatttccagtttaagatgccatactgaacatatacactgatctctttgcctttggaaactccattaagctgattgtaaaggaggaaaaggattctcacatgacaatgaagagactgaagaagtatcatcaatggataaagcagaatagaaatagcagccgcctggaccatacctagaaaggaatcattttgcctggcagaagcatgaaacagttccatatttgagatggcatttaccactgagggaaaaaaaaagtatcatgtgaaagaagcaagaattggactgaccacacacttgtcattgccaatcagatgctgcaaaacaatgggatctgtttttcagagttctgaaataaaatgctaatcaaacta

SEQ ID NO: 214 - DNA, 183 bp, homo sapiens
  misc_feature (1)...(183): n = A,T,C or G
cctcttgggcccttcttaccctgggctttaacttattcccaaaaatcttggtccctttgggaaagaacaatggctcaaacaagaatcccaattttcttttggcaagcaagtccaaagtggtcccaagggcttggcaangggaaacaccaaggtccattctttaacccctttaacaaaaaaaaa

SEQ ID NO: 215 - DNA, 335 bp, homo sapiens
gctgtcatagaagttacttggacaacaccacccacccctggggggtggggtggtgggaacttgcttggtgatggcaacaaacaaacaaacactttccccttcccacttctcttccggtattccagacaggaggaataatgtactgatctgctgacattaagaaggaccctattttcagattacttcttcaaaggagcagcatctacattggcaaggaccgccgtgaggatccaagtgcacagtgaggtggggggaggcagatacatggattcctttccacgtggcccacaagaaacacctgtctctccagactcggggaccaccagggaccttga

SEQ ID NO: 216 - DNA, 306 bp, homo sapiens
gtccaccttctccaatccctgcctgctgggagaggacgatctcttgagaaaggaaagacttctgtgctcccgagaacttcctatcaggtcctggctgcagggaaacaagctgggctttttataattaaggttggaagaagtcaccacaggcagcagaactccatcttgagatgaaataacatctacctggacctctggcagaatttcaaggcacacactgggctgactctggcgccatgatgttgccttatccttcagcactgggagatcaatactgggaagagattttgcttccaaagaatgggt

SEQ ID NO: 217 - DNA, 374 bp, homo sapiens
cccattcccttgctcctccaagagagtataaggatccatgcaccactcggagctggtcctgttgaaatgtttgctgaataaaagcaggaagggtggggaagaagagaagagaggagagaaagcacaggggaaggagtccagcactgacaacaaatctgtggagtttttccagactgaattcccccagcaaggaagagtggaaggaattcgagccctgtcacagaaacctggatccacactctaccttcaggcagaaagacaatgtcacagtgtctttatccactatagtgatgcaggagacaatggaagggaaattttggtgtcatgtcataagcagattacaaataataaaatacatctgaaaattgaaaaaa

SEQ ID NO: 218 - DNA, 380 bp, homo sapiens
ctggggccctaccccctcctccaggaagccttccaggcccatccagatggaaactggccactgggcctttggacctggcagaatactcattggctttcacctgctccctggcatgacactccaggacccaagcacacctcactatgcaaatgtggccatctgactcctcacccaaactccacaaaagtgccaaaaaggacctccatttaagaaccataaactacatttgaagaggtcttcccaatagacaagaagttttttgcaaagaggaccttatctgtacttctaatgcccagatcagcacctgccagatggccaataaatgtcagctgaatggatgaatggatgaataaatgaataaatgaacggaaaaaaaaaaa

SEQ ID NO: 219 - DNA, 140 bp, homo sapiens
agttttcaccccaacagctcacctggactcctcagtttctacccattggtacatctccacgtgcctccgcagtttcacagccggaagatggaccccatagtttggatcagacaaaagcttcaaacagaatcaaagaaacc

SEQ ID NO: 220 - DNA, 256 bp, homo sapiens
  misc_feature (1)...(256): n = A,T,C or G
tgtgtaggaaaagaanatcttcttgntgcacgcattgttancctgaaagctnttcattttttgncatttngngtgggnacacncacanaacnttcanntaatcaagccaagccaagcntcaaccgcctagcctgnataggncaaaccaacaagtggngnaaaagnngccacncttttcatccctctncaccgactctggtngtggncctggaaatccccacacaaccgtttgnggatcccccaaatgggcgccatt

SEQ ID NO: 221 - DNA, 313 bp, homo sapiens
  misc_feature (1)...(313): n = A,T,C or G
agctaagagggccaacctttctcncaataaagtcaaggcagccactttcttctccatgggttgagttggcgtgaaaagaagactcctggcagaatgcaacttgaacctgaagagctttattcaagaacaattgaaactggaaattatgtttctaacatcacactgccttgtacttcatgcgctttattctacagagtactttaaggctacacctacacctcagaatgtttgaatttattcaagaaacaaaactaggttaaataataatataaaatgatgacaatgataataataaaaaattttttttcatttg

SEQ ID NO: 222 - DNA, 101 bp, homo sapiens
  misc_feature (1)...(101): n = A,T,C or G
cttggcaaggacatgctcaacaaaatccaatnttcattagnanncanccaagtgtccaaggctgcaanggaacaccantcatcttacgccttacaaaaaag

SEQ ID NO: 223 - DNA, 316 bp, homo sapiens
  misc_feature (1)...(316): n = A,T,C or G
cccaagcaaaacacactcagccttgaagtcagatgctctacagaagcctgcaaaaacagagtcaggagttgtgtggccttggccgagtcacctcacctcaccaagcctcagcctcctcacctattaaatggggacacaataggacccacttncttggagttgactgaggcctgggagctcctggaaggcacagacactgccatgcctggcacaggaaacgtactnagcaaatgttgcttcagtttgaaatccaactttttcagccttctgagnttcctttctctccccattaaatgcttcctaggctaaaaaaaaa

SEQ ID NO: 224 - DNA, 369 bp, homo sapiens
  misc_feature (1)...(369): n = A,T,C or G
ttcaccttcattatcaggatnaagatcttgnngtggcacgancaggatcatgaccattaccgttctggcaagatgtacatngagaatgaccttgggttattgttacaccgatcaagtttaaccatcaggattgttccttgnggttttattgngtctctngggttgnaaaagagnttcatttgcttaagggcgtccccacgcctccaccttggggggaagttaaattgggnaatcattttattgaaaaaaattggccagngttttggcttttttgganaaaaattttgccttttgggcnttcccaaatttcttggttcattttccccaccgnattggccttggtcctggtggaaaggccggctttaccaa

SEQ ID NO: 225 - DNA, 135 bp, homo sapiens
  misc_feature (1)...(135): n = A,T,C or G
ttttttattttatggagtnatttttncagtcgtncttcgagccttgggncttcttgctttntttnanttcccgattgaagcagcctgaggccctcatctgatgcagaagctcaatctttgaactttccagtcacc

SEQ ID NO: 226 - DNA, 117 bp, homo sapiens
atgagactgaaaaagagaacacccatattccaggactggctctgctagaaatcagctcaccttaggaaggtcacttcatcttgctagccaagcttcctcatctgtaaaataaggaga

SEQ ID NO: 227 - DNA, 330 bp, homo sapiens
gtagttttgtttcactctaatgcttcccttaacgtgcttagccagagtactttggttataaaccggagtactttgtcttcaacaagaagggactgtctcagagacccaggaaaaggcctatgccaggcagtatggggcacagacttctgaggaattgttaagataatattgacaacataccatggactgagtcaagctatccagtaatctagtgaagaagctgatgagttcatgagactgccggttcaaactcagcatgattttatcgtctttcaagaaggagagaatgtaaataaattagctaactttggaatcttgcaaaaaaaaaaa

SEQ ID NO: 228 - DNA, 381 bp, homo sapiens
  misc_feature (1)...(381): n = A,T,C or G
gtggaacccggggggggccccaagggccctaatngcctccacccggccaagtggcctggaaacatctgggggccctgggattctggggcatcctcatggaaccattctggctcatcggtcatcccaagtggcttggatcttccaagggccttattggggataagaatcaaggggaagggccatcaacttggaaggggccaaggggaagctcttgccccatggacccttggnaattccccaccggttacttccaaactttccaatttcctcngccctagcccaccnccgggngggcctgtatttaacctnggaatacaaagacaccntnttnaatataaccttccaacaaccgcctttttttcttaacaaaaatgggggcaa

SEQ ID NO: 229 - DNA, 524 bp, homo sapiens
  misc_feature (1)...(524): n = A,T,C or G
gtgcctctgatcatccaaggaagaaatgcagaagatccaagctaaagctttggcaatggaggaaagaaactgtattcaagggatactttagaagtaaaaatcaaaaggctgtgattaagaagggactgtcaaaatgcccctgagatttttaacctatgagacgaggaggatcgtggaacctttaactgaaacatgcaaatatgaggaagagaatgccagagtcagcaagggaccgctcagtaaggcacccatgaggcaacggggcgatgtccacaagatattaaatgacagatacacgggtttagtgatcaagagatctcgggctggggggnaactgccaatcantgtggnaggntngnaaatggggagngtgncnaaaaaaatggggaaagccaanaacaaaacctgtggaacaccccgaagggcncacagcattgaggaagggcncggagcaaaacctctccttttccattttatctccctggggggctggaaaccatttnaaaataaaaagccaaaaacca

SEQ ID NO: 230 - DNA, 195 bp, homo sapiens
atgaagaaactggggctgagagaagctagtttacttcacagcctctaaggatccagtagatgtatggatgaagagaggacacacacaaagccttaccagacacatggctgtaagatctgaaaaagttttggtttgaaaataaaaatggctaataatctatattcatataaacatatttaatgtgaacacaaaaaa

SEQ ID NO: 231 - DNA, 233 bp, homo sapiens
acaggtcggcttgcttcagaattctaccaggagaaatgtaacaacctggagagactcaagcaaaaatgcagggagcctcagacgttctaaaacacagaacaagaatgggaatgatgcttacctaaaaggattattgtaaagagtaaatacgtaaaaaacagagtccagtttgtgcagagacttatgcataaaaagcatttaataaaggtccgtttcaactatgaaaaaaaaaa

SEQ ID NO: 232 - DNA, 224 bp, homo sapiens
cacattcctcattgaacactcacctctcatcggggatcaacatgttcagatgtgccatacccaggatgattcatcgtgatcaaagaaaacaatgtgattgtggtaaatccctttatcagtgtagcttattattactaccaagaacttgaattgattcaagctacagacttgaataaacctcatgatttagtaaaataaacctcactgattttcaaaaaaaaaaa

SEQ ID NO: 233 - DNA, 499 bp, homo sapiens
  misc_feature (1)...(499): n = A,T,C or G
gttaggaagctggaacaggacacggtttgggcagcaaagctgttgtgtgctgataaccttgaaatctggaccatattcagtgttgagctagagttggcccatacntattcctgagtgctgattggtaagaattaaaggcnatttgaaaagggatttagattgaaaaccagaaatcnatnaagaaaaatcaacnaaacttgaagctgccttttggaaaacatccaataaaattgataaagttttagccagacacaggcacaatccttctcactgaaaccgtgttgcagctgccagtttttacagattctaatgncctttccaaaaaaatgagtagagtgtccaagaaaaggntttcatttctgggatgatgcttctgaacctgctcatttagctaagttttcaaataccatttgttgaaaagactttcctttcccattgnctatccttggcatccttcttaaaacanaaagngctggagattcattccaagtcaccgtgg

SEQ ID NO: 234 - DNA, 483 bp, homo sapiens
  misc_feature (1)...(483): n = A,T,C or G
atcctttggggaagatttatgtggcgaggatcactctncttanagtgagactgcagcaggaaaaaggaagagactttgaggtcaaagggaaggaggtgaacagagatgggaaaaggcgttgcaggtcaacaagtcccaggctgttggacagtgatccagaaagagagtgagagctcagaggtgagccgctgtgtgggagctcctggagatacaagatacaaggagtggggattcccattcccccaggatgccagccagagcacctggacccagtgagacctctgggacagtggacatctcagtagtgaccagaaggtctctggccctgcaaaagcatttangaacttgtccacaaactggaacttgtccacaaattgtccaagactgagacaattcctcctgacatgaaagggatgggaactcacaatttgatttaaagttgattcacaaaaataacaagatgtcatattcctcgctttctta

SEQ ID NO: 235 - DNA, 158 bp, homo sapiens
  misc_feature (1)...(158): n = A,T,C or G
aatgtgagccaccaacaancagcatcctgaaggannggctgcntcctctgcgcactgtatgcatgaccaggcctgagatgaccacgaccataaaccagcnagactgatgtgnggaaaaaagtaatgggggtgacnngttccctacacttggaactaaa

SEQ ID NO: 236 - DNA, 141 bp, homo sapiens
  misc_feature (1)...(141): n = A,T,C or G
acttactgctttcaaacaacnntgtgtncancngtctcttgcattgggtaccatgaataaganccactattttcttccattgcctancngggtatttttatganatganccgtgtgggcnaccatacttggattttccttt

SEQ ID NO: 237 - DNA, 219 bp, homo sapiens
  misc_feature (1)...(219): n = A,T,C or G
tgcacgtggcacagagtcagggctgacattgagcagggcacccttggtctcccccaagacccatcaaaagtgtgcctggcaccgcctttcaataaaaaagcccaaggtctgaacanggtggggcgtcttcccttccccagcaggatgaangtcanagctgnaattgcttaattcaacaccnaaaacagtcctgnangaaaatggggtgagcttggcttg

SEQ ID NO: 238 - DNA, 301 bp, homo sapiens
gtgtcctagaagaagagaccctacactgggcttgtgaccagcggaaactgaatcaatgctggagacacattctaacagtcgaatgggcagctcacaggagcaatgaatttgaaaggaaaagagaaatggaggaagaacatgaagaacaaaattatatgtatagttgaaaaactcacttggcaacatggataagaattgagatggtttaatttcccttaatgactaaactttgatagaaatctcatgatgatagtgaaagtagaagtagtaataaaaatcccctccctctacaaaaaaaaaa

SEQ ID NO: 239 - DNA, 519 bp, homo sapiens
gaaatatgtggcctcttggttaccccaccagggataatcacacccttcctatatgagtgtttgttttctgacttgactccatgcagcagaagaccttctgcaaggaacagtctaaccctaaagcatggataagcagtgtgttctaagacatgttgcccactgaagcctttgaagtttaagcatcaagaaatgtgattaaagagacacacaaaaaagaagttcttgaagggatgatgagcaaagattaacagaaaagtacatttagatccataaaagctgtcatttaatacactaagagtccaaatcaccctgagtgcatcttctccttgagataccctgcttcctttggagaaaatggaattaccgtgtttgtggtgagagaaaatgtttacctagagaatcaacctgtaattaacagaactttttgacttgagacatacaggtgtgcacatggaatgcatcttgacacatgccagagaaactggctttacatctgggaaagctgagggcaggatatta

SEQ ID NO: 240 - DNA, 149 bp, homo sapiens
  misc_feature (1)...(149): n = A,T,C or G
aatcatatgcagagtttttctttgactgcagggntccccaaanaccgaggnnnnganaacgtnngggattcctttgttcttggagacaactccanagaacaattctcaataagaaaagttataaaaagcttcaatcagcaaaaaaaaaa

SEQ ID NO: 241 - DNA, 190 bp, homo sapiens
  misc_feature (1)...(190): n = A,T,C or G
gacttggaagctaaggcccagagagggggagaaacttgatcaaagtcnatcaagacaatgcagnattcgagaanngggcccggaaccttatatncccaccttggtctcccaaagtgcttagaaaaatacctctagttgaagccaaaagctagaatccttttacggaaactacagggattaaaatggggga

SEQ ID NO: 242 - DNA, 137 bp, homo sapiens
  misc_feature (1)...(137): n = A,T,C or G
agttgcgcagcaaacaccgacttgagcgtggctgaggattananacnanaactggggntatgcaccagttgccaccaccagggcagtgtcccaccnaacacangggtttcnnttgaattttcccacttgtaccccaa

SEQ ID NO: 243 - DNA, 323 bp, homo sapiens
  misc_feature (1)...(323): n = A,T,C or G
gagcagctggtcacacngtgatgactgctgctatctctggatgtagtcacgccaggtgccacatngtgaggnnnctcatcagcacctatggangncgcttnttataacattgaaacaaaggtcttccgccaacaaccatgagtgtgccattttnaaaaggatncttcatatncnaggactttgtccttnngtnttctcnncaggtcatggccangaaatcccacatgcagccncacaagganncctttttcagctanaaactaanatctncccttaggacntngngtgnggggcgctgntgccccccacaagaggattattga

SEQ ID NO: 244 - DNA, 120 bp, homo sapiens
  misc_feature (1)...(120): n = A,T,C or G
catgaccagctggggnnggaaaaaaccccgaaacattgggnactgtgtattancttncatgtgaaccagtttagtncngccagtngntgnagaatgccctcaatcattgccttattggga

SEQ ID NO: 245 - DNA, 518 bp, homo sapiens
  misc_feature (1)...(518): n = A,T,C or G
aggggaatgccgaggatcaagagagattggctgacatgcctgttgtgcgttttgtaagcggcacagggggattcttctgccccacttctactgactccgtgatccagtgctgccttgaatcttcggaaactctaaagtaggggctccccgcttctgagaaagactccgtagctctcttttggacacagctgcagtgccatccttctgggagagccagcctggagcagaacagctggggctcatctatctgctgcccaacaaaccttggaaggagtatgataggaaggttccattcagactgctcttctctggtggctctggggaaaagggcatgatgaggggagatgcccttttttcctcctgttaatctgccctcatccctgactccctttcctgctgtcttctatccaaccacacagtacccagcttaaaaccaaggtgggatggaaaagggttcaagttgatcatggaactcanaatgcatttttctgnaaaagtagctggaatgcgatgcctgg

SEQ ID NO: 246 - DNA, 202 bp, homo sapiens
atgacatgatgaccgaagttctaccagctgttatggatcatgcgatgtcccagaggaaggaagccacacccttggatggtaaaatagaaggaagagaatttggctgtctaataccgtggtgctgcagtactaacatgagtttatgtatttccagctttcttttatatgaaagtaaaataattttcatcttataaaaaaaaaa

SEQ ID NO: 247 - DNA, 188 bp, homo sapiens
  misc_feature (1)...(188): n = A,T,C or G
tggatggacagggtcncagactcctctggatactaaganatctcatgagancatcctcacttngaggccacgtggcccaaatttngtgagaggtgatnacgaccaaaccttcacctagtgtaagagaggctccctaacaggccttcctccactgatntacgcatgaagtcctctagtggcccaggggg

SEQ ID NO: 248 - DNA, 142 bp, homo sapiens
  misc_feature (1)...(142): n = A,T,C or G
ctaaaatctttataaaaacccttgngggnacagngaggctgattcactgaagggaaagcgtttcaaccgngncatttgctctctngcattccagattagcaaaatgggggtanagngcgttatncgaattttatcaccataa

SEQ ID NO: 249 - DNA, 251 bp, homo sapiens
tttcaagctgacttcagatgcactgtgctgcgtcttctgcatttgggaccttgcctgtatccagctctcggatggtggtgaccagggatgttttgagttctccagcctcattcctcgtctgcctccttaggaggcagttctcccaggggcagaaggtgaatagatggcagtaagaattccccctcactgtaacccctcctcttcttcccctgataataacagcagtcgtaaatgccgtttaaaaaaaaaaa

SEQ ID NO: 250 - DNA, 288 bp, homo sapiens
gaataaactctgaccttcatggaaattctaccacctcagtaaaggaaaactttagctccagctaagcctagaatcctgcaaggaagggaagctgaaatgagatttttattggaataaggaacatgcactcttcgagttctgagatcccaggtgctttgccgtgagaaagatgaggactgggcttgtgacctctgacaaggaaaatgcctggcaggaaatctactttctgtcaggctttccaggagcagcatgggcctcagaaggcctgagggagtggaaatgggctgg

SEQ ID NO: 251 - DNA, 425 bp, homo sapiens
  misc_feature (1)...(425): n = A,T,C or G
ccaaagcatgcacatgcatgtnacatcatacnnttggattctactctacgcactcttcgcaaacatctcccatgtatcacatccatntgtctacctgnncgtacaanccgtatctcgtcaccntgtacacattgtancaagaacttggatngcacactcattcactccaaaccgtgcatatatatgcgngantttatgtaacntaagacaaccacgcgcgtgtgcacccaattactctaagcacaaagcgcatgtgcactttctttannccttngccngatatannttcnataggaaannncaagcccttntcncttactatancgcntgcactcgancaaattngtcatcgcnaantttnancnagnggacacntagaaagacacgatcactancaatcgctcggagacatggagaaagccaaa

SEQ ID NO: 252 - DNA, 250 bp, homo sapiens
atattctcttacaaggaaactcttcattttgaaaatattttccaattgacacttcttttgcaagcatgagttacacctcaaaagaaatatgaattcatcaatgaaagaaactctacgttaccaaactttttttccatttcttaactagagtctggcataaattatgccctcaataaatatttgctaaatatttatttgtataaaatcttaaaataagttaaataaaagcatattcagaggaaaaaaaaaa

SEQ ID NO: 253 - DNA, 329 bp, homo sapiens
cgccatgctcttctaatcggctgaactaacaggatcaagagaatgaacttgcaggaccaggagaatgaagtgacagtgaaaagaacagcgaatcacaaacacatgggccacagcactgcgcagtgacattatgaatagagggcctaatggcttatctattgatctatctgctcttaattctgcttggctgttactttcttcaagtaacatttccaaattacattcaaattcagtctccattaaggaaacaggactgtggaacagataatccaattgtcatttcttttcgtctttggaatgggttctaatggtaatttgaagaaaagaat

SEQ ID NO: 254 - DNA, 400 bp, homo sapiens
  misc_feature (1)...(400): n = A,T,C or G
gtactcatcatcctctgtgccccactccagctccaccttccgcctgatggcctctgggagagagacatggatggcctcaatttatagagaagggaaactgaggctcaggacaagactgtggacaccaggcaagactggaaactggtctgtcagattcagcactgctcagcctcattccacccaaaactaaggtgaaaagagcaccaagagctgcaaaaagggggactcaaaggagagaaggggcactgaagctgagacactgccctgggggtgtggagatctgtgtcggcaatgtcagatttcactgcctcctctgggtcttgcctacacacatggacaccctgccctgcccttaagcccaggctcaagcacattgtngggtcttgttcacaggcagcac

SEQ ID NO: 255 - DNA, 331 bp, homo sapiens
atcccaaaggaagcaagtacttaaatattataaacaagtgataaaaataaaggaaaatgcagaaactctggccaagtcctcactcctcaggaagcaactgagcatcagcctcagcgatacgttgtgtaaattagccttctgagagaaattgagtggatccggagccggagatattggcctcaaggtatgagccagcaacattctgagggttctaggaatggcttctcattatgggagcacttggttaaattaaactaccacagtgctcagagttctaatacagtgagctctgcaatgtgcatgaatgcagataaattgcacagggctagaa

SEQ ID NO: 256 - DNA, 333 bp, homo sapiens
ttcttccagtgtgaagacttcagctacatctcagcaagaaggaaaaagtgtttgttcatctacaacccacagtgtgctgcacttgcttctgtttggataactggactcctcaagacagcagcactcaccggggcaggagctacaagccctctatgttgactgatcctcctccaggacaaggtgaatttggaattctggaatttggaaaattggcccggtgtagatgctcaggaacccagtaaggacaacagagaccttctaaatggtgataaagttttcttaacttttcctttcaggattttatttgcatctcagaatattgtattagacatg

SEQ ID NO: 257 - DNA, 334 bp, homo sapiens
ggacacaagaggttcatgtgatgtaataagaaagaaataaaggaagctttatctgccgctctttcaacctcatccactcaacacttaccccgtgacagaccccaatactcttaatgaattcccaaggttacgaaagaacttggaagatcttacattcctacatggtgattacagaggctcacattttgccaagtcatatgcaggtggctgaaaaatgtgatctaacgtccttgaacacatttattacaatccatcatctacatggcaacagtcagggccatgctcataaaccagaactggtgctagatctggacatgccttttgccttctacca

SEQ ID NO: 258 - DNA, 220 bp, homo sapiens
ggctgacactaactcattgccacctgctggagaagagaagacgtgcagccagacacctgccgccttgtcaggcctgtgtcgccgcctccgcagcccgaaatcatcctgccctccaaggcaccgccctgatgctccaggtgaaggctgaagaatggggctctcaaacacatcaaagcctgctaagtctccaattctccctgggaaacaagaaaccccttgg

SEQ ID NO: 259 - DNA, 263 bp, homo sapiens
  misc_feature (1)...(263): n = A,T,C or G
ccttcctgaccatatccnctgtctctttgcctcttgggaaactccnntttantntgtgnnaaggggggaaaagggttctcacatgacantgaanagactggtngaaaatatcatcaatgggggaatagccgcaataataaaaaatcagcccgccngggccctnccctttaaaggggatnattttgcctgggggcaagcatcgataacaacttcccctattttggggaagggnntttttccccctggngggggaaaaaaaaaaa

SEQ ID NO: 260 - DNA, 458 bp, homo sapiens
  misc_feature (1)...(458): n = A,T,C or G
ctattgcaggtctgacgaagcagggatgagactcacagaagacagctgccgctttgccctgtgaccgaggtcctccgcaatcattgctgctctgcttacagaattattatcatggtgaaaggaaagagtgctttccaaagtgtgaagagttatgtagtgattgtttaccccttccatgtgggctgggagtagtcagggagggtcaatttgctgtccacattcagcataaaaatagctccaatgtgctaaaaatatttgtcatccacacagagaaatctgcaagtcctcaccacggagccttgaaaaggaggtcacagaaatatctggagcaaaaggacttnctctcactttgctcacctaatagcaatcttanaataagggtttcttactgctangcccaaaaactggggtttttgcatttttgcncnaaaattttgtctggggtctgcttacctctg

SEQ ID NO: 261 - DNA, 141 bp, homo sapiens
  misc_feature (1)...(141): n = A,T,C or G
cctttttgagcaagttcaagcctggttaagtccaagcttgaattgggcctcgctncccatttaaangggncgccgccatttaaaatgggccgctntggggccanattcttttgggnttttaccctgggggaagaaaatact

SEQ ID NO: 262 - DNA, 128 bp, homo sapiens
  misc_feature (1)...(128): n = A,T,C or G
gagcatggttcagcctggttaannccaagctgaattggccctcgctgggccatttnttttgnnttttaccctgggnaanaaaatacttataanncacctgnttgntatttacccccattttttaacaa

SEQ ID NO: 263 - DNA, 407 bp, homo sapiens
  misc_feature (1)...(407): n = A,T,C or G
ggaccgctcttgggggggggaggcctaacccttggcatttaaagttcaagaaaacttggaaggcttattttgcccnggtccttggatggnacaaccaaggagtatgtagcactncaccaacaaaagtaccagcctggcgttggctcnttagaccccntgtttaaccnaaaangtgcccttncaccnagatanaattttggcttggcttctttgctttaaccaagaaccttcatttnttcaattgggntggaacaagggngaaacangaattttncctttttgcccacccggttngtnggaagtngtaagaacctcccaaaaangnnggggggccccccnggaanggcccccctcccaaaaaggcccccgttttgnccttaaaaaaaggggaatggggggtgggggaa

SEQ ID NO: 264 - DNA, 558 bp, homo sapiens
  misc_feature (1)...(558): n = A,T,C or G
cctcttgggggggaacttacctggcatttaaagttcantaactgganggcttccccgtnattcaggtnntagggatggggcagnccantgccctngcgngangngncattcgtaacntttcacccttggattngcttggcctntcaaactancttctcaaaaattaccgtgggggcccaaggaattgggggggccacgcgttcacgaattggactngattggggaccagccttngngaattttcctttaccaantgggaaccaattcccctangcaacccccctttcaaaangngggtancnaanaggggcggccaaaggctcggcaacgtaaatantggtaacctaaccaaagnggttggtgcgnccaaagcctattnccaatttggacntttggtcctttctnggggcntttaaccccaaagnccattatcggtttcggccnntctggggccngnatgggggttttaaatccaagggggnccccttggttggccccttnggccntttcgtnttgcggttcgttgaatttctattnaattaaattttcggcaaattt

SEQ ID NO: 265 - DNA, 367 bp, homo sapiens
  misc_feature (1)...(367): n = A,T,C or G
aaaaccttggaagaggttcttggggaagnggctttggggggccattctttggaaggaattccgggggggaccccaaggccattggggtttaaggggttttccttggggttggccaagcccccaagnaagccaagccaaggggaagccttggtggccccccttggggccccccccttnggtcccttngaanggaancctttccccacttggggtccaaaccccccgcccttaacttcccaaagcttggggaaccctttggaattggccttttnnacaaccnaaaggggtgggttggcccnccaanaaaggggaacaaccaaggggccnccttttcaantggggaagccaacccaattaaccttttttt

SEQ ID NO: 266 - DNA, 300 bp, homo sapiens
  misc_feature (1)...(300): n = A,T,C or G
gttgactccatggatgcagagcccacagacacagagggccagctataccacagcacaaatagtctaaagcaacaagaaaaattagaagacaatgaagcaatgcctcanaattctgagtaaaaatcattttaacctggaattgtataacatatgtgttatattgtttcagagatgactacaacatttcttcatatctgggtacgtgtacctctttgcaatgngatttcacttctcccatcagggagtggaatctatttccccacttcttgaatctaanctgatcttaacttatttcaaccc

SEQ ID NO: 267 - DNA, 445 bp, homo sapiens
  misc_feature (1)...(445): n = A,T,C or G
tgggggggtaggcttaccttggccattttaaaggttcaaggaaacttggaaggaanctaaggnagngtncncanggaatntttggggncttcanttaaggnncttaattaagntttngccccaacccccttgggntttttattacnaaacccttggggaaactaanngggaaagnccagnatntacccttagcccttggttcccccgnaaggggccattggggaataggccttggtaatatttgantnttttactngcactcnctncttaaggggantcgaaatnggaattaaccaaccaatcttacncaaggaaggggttggggcnttggctcaagggngaggaacccaaggttgtttgnagacaaaggccccttctttttgnttcccccncaagtaacnttaaaagggcccanaaagaaaaccccaatttcttggggcccccc

SEQ ID NO: 268 - DNA, 106 bp, homo sapiens
  misc_feature (1)...(106): n = A,T,C or G
gcggccaggggggaaaaacgccatgcttaaaatcccacggaagtgagcctgaggnagacccagnccnnctcgtcttacccaatngngcaaaacaacccccaaaaga

SEQ ID NO: 269 - DNA, 447 bp, homo sapiens
  misc_feature (1)...(447): n = A,T,C or G
ggccattttaaaaggttncaaggaaaaccttggaagagggaccggttggggttggggggttccccttccttggggttggccggaaaaattttccccgggggattttttccccttttggggggttccttttcccggggttaagggggaaggccttggttaaaattccanaattttggttggccttgggaccacaaccaccaagggggaaggccccncaaaaaaaaccccttggngaatttaatttcaatttcttcccncctgggaaaagngggggggaatttcaaaaggggggacccgggngtttggaaaaccaaaaaacctttttccccnccctttcctttggttggttggggggttgaaccaattgggggtggaattggggnncccccaaggtccncaaggaaaaaaggggngccaaaccccncagaanacctttaaaaaaaaaaa

SEQ ID NO: 270 - DNA, 623 bp, homo sapiens
  misc_feature (1)...(623): n = A,T,C or G
ccccagggggtcccanctttnttggggggngggaagggggaaaaaattgggggnacccattgggaatttttttccccttnacccaaattttaattgggaaattttaaccntaatttattnccccggaggggggaangncaaaanccaaaacccccacctttttttctttcnttggccaaaggtngggggaaaaaaggggggggaattcccggnccccaagggttggggggaaaaaggtttttccaatttaaaaattgggtgggcccccgggggaaattggaaacctttggaaaaatttaaccccgnaacccttgggttgggaaaatttttttgggcccaaaaaaattgggtttttttaaaggaaaattttttttggccccccaccccaatttaanccccccaaaaaaatttccntttggggggggttngggaaaaaaaaggggggaaaaaaaaaggggggggggggcccccggggggggggggnaccccaaggggggaaaangggggggttggggtttnccccccncccaattttaatttggggnnttttaaaaacccaaattttccaaaaannttttngggggggaatttcctnttncccccttaatttttaaaaaaaaaaa

SEQ ID NO: 271 - DNA, 145 bp, homo sapiens
  misc_feature (1)...(145): n = A,T,C or G
acccttataacaggatatntgaacacacnatatgagaccagggannttgacacacagcaggaaagaccgtgngagaacatggtgananaggccagccatctgcaagccacaanagtagaaggccttnanggagaaaaccacattg

SEQ ID NO: 272 - DNA, 164 bp, homo sapiens
  misc_feature (1)...(164): n = A,T,C or G
ttttaaaagttccagnaaaactgggagggnccataaccccccaaaaaccaaaaattttttccccaagncccttttccttggccaagtgggaaggggtgggggaagccccaaaaatggnacttaaaaaatttcttggtggttggnttgggggaagaaaaataaaa

SEQ ID NO: 273 - DNA, 290 bp, homo sapiens
  misc_feature (1)...(290): n = A,T,C or G
aaaccttggaggccttttcatttccgccaagttaaggggnaaatngggccaaggcccccccattcttatttggaaaanggggaaaangganccnngggtcnttggcntggggggggggggncccccgggggaatgggaagntaccttggggnaaaggtnggtttttaagaatgggaagnaaacctttananagggnangncctttcntncanttggnccaaangaaaaggtttaaagaaaaangccntcnttttccgaaaatccaaaagntttggtccccccaaccaagg

SEQ ID NO: 274 - DNA, 358 bp, homo sapiens
  misc_feature (1)...(358): n = A,T,C or G
cttgcttggcttcacttctttttgggggttcccggcccattttggcctttttattgggggccttggtttaaaccggccttccaacccggccggaaaagggttccttggcaaggccttttccccttcccttggaaaaggccccaaggccggaaaaaacccaacggaaaccccggaccccggggggagggggaangccggaaaattaaaccttcccaangaancngccncccaacccttttaatnanggcttggggaaaacaanggtccanccctttcngaaaanaggggcccnggcaaacctttttacatttccttnaaananccccggccgggagngaanttaacccgaaaacccccc

SEQ ID NO: 275 - DNA, 504 bp, homo sapiens
  misc_feature (1)...(504): n = A,T,C or G
aaccattattaccacctngggatncttcttttttggcccctnttttgggggaaaaaccttccccaatnttaaaaggcctcgnaatnttggttanacaagggggaagggggaaaaaaaagggggaattttccttccaacccaattgggaaccanaattggnaanaagcaagcaacctnggnanaagcaaaagggtnaattccaattccacaattggggggaattacaacaaggccacgcaaaattaaggnaaaaaattaaaggcccaaggccccggccccttgggggaaccccaatttaacccctttaagggaaaaaaaggggggaaaattccaatttttttttggccccctttgggggcccaagggaaaaagggcccaatttgggaaaaaaaacccaagggtttttccccccaatttaatttttttttgggaaggggaaattggggggcccaatttttttttaaccccccaaccctttgggaaggggggggggaaaaaaaaaaa

SEQ ID NO: 276 - DNA, 177 bp, homo sapiens
atgaaaacagcaactgtacctgacttacctaaagacctggatgagttaagaagcagacccaggacttaaagacagatcttttgaattcagagctctttctccaggaaaagagaacctacaatgtttcagaaataaatcacattgcagtagatcctttggagcttcaaaaaaataaaa

SEQ ID NO: 277 - DNA, 110 bp, homo sapiens
  misc_feature (1)...(110): n = A,T,C or G
cagccggcctttgtttttttgcanacggnatntctcatgcnngntgcnctgtctccttgcaacctatttttntactttctccaataaatcancctttttctgcctaaaat

SEQ ID NO: 278 - DNA, 102 bp, homo sapiens
  misc_feature (1)...(102): n = A,T,C or G
ttaaacaagcgacgtncttnccttccaatntatggattgaggacaatgccaacaagccagnngcnctgtnnacactactnattgngctaccatttttctgga

SEQ ID NO: 279 - DNA, 226 bp, homo sapiens
  misc_feature (1)...(226): n = A,T,C or G
gaaggcctttaaggatgataacgcanaatggatcagccttnagtctaccaagtcccatttcacacgaagtcttgcaccaatccgaaaagagaaggttatggacacagaagaggtttaggaanggctggaaaaaaaatctncaatgaatgacacaccacatcacggtttattctcctacacaatttgagaaacaatactagaaaaatatcataccataaaaaaaaaa

SEQ ID NO: 280 - DNA, 166 bp, homo sapiens
tactgggaagactttgaatacatcctggatccagaagccaagaagccagataactggaaggaggctatggatggggagtgggaaaggcctctgatgccaaatccgaagtataaggacctaagagaagcaatggagagaactttatgaagaaattgaaaaaaaaaaa

SEQ ID NO: 281 - DNA, 134 bp, homo sapiens
  misc_feature (1)...(134): n = A,T,C or G
gaaagacatgttgattgatacctnatgagagactantgagccagactacccagncaccttaacaacccaagatacctgaccatcaacccacangcgtgaaataataaatgttcagttgttttaacaaaaaaaaa

SEQ ID NO: 282 - DNA, 218 bp, homo sapiens
atagtctaccctgtatatactttatctcatgagtgccaaaaagttgaatgagtatcaccatgaaaaaaattgaatgtgcattgccacacttatatttggatctagacaagagcctcagtaaatgaataagaagacaacataaagtataagaagcaggaactcaccgatcactcacattattctctaattaaaggttcatgcttaccacaaaaaaaaaa

SEQ ID NO: 283 - DNA, 301 bp, homo sapiens
attataatccatatccagtcaaatatgttggaaaacctgataaagactctaaaaaatgctgcagaaggaaatttatcaaaatttgtgaaaagacatgtgttctcggaggaagtgctggccaaggtgagggaaaaagtgaaggatgtgcctgcccttgtggccaaatttgatgagatctatgggacactgcacatcactggccaggtcaccactgattctttggatgctgtgctctgccacacccccagggacaggaaatctcacacgttgctattaaacaagaggatggtcagccggtgca

SEQ ID NO: 284 - DNA, 304 bp, homo sapiens
aatacccagagtggcttgtgtttcctgggctgaaccctgcctggagagctgtccctgcaagctgaactaacagaagatgaagaatgaggtctccctgaaatgcccaccataagactgccagatatgggactgctggatgacactccggctaccccactgagttttatgaaaacataacagaataaagacacttacttgtcaactcagttacaagctattgaggcactccagagtgacagcatgtgatccccctgacacaagaaacaggcccagataacacaccgttcagaccaacagcagttct

SEQ ID NO: 285 - DNA, 315 bp, homo sapiens
aaacctgggaggcaggcatgtcctaaactgtgaattgcagaacacaagccagaaataaaagcatccaaaagcttgaaggcagaatccaagggtcatcaccctgcctgcaaggagcctaactggagagaaagaaagtcccttaattcattcaacacatatgaatcacgcaggcctgctttttggtgaaccccaggtttggttctggagatacactggggcaccagaccagcccctcccctctcaaaggtttggcaaaatatgctgtatgacacagcagaataaacgttgcactgttataaaattcaaaaaaaaaaa

SEQ ID NO: 286 - DNA, 241 bp, homo sapiens
  misc_feature (1)...(241): n = A,T,C or G
ttcaatcccacgtatccattgagaacttggaatttacacattgtgttgacaagagttgaagtgagtgggacaccctgcaccaggactcagctggaggacatggccacccaaatgggtagttgcggatctcatattcagtcttcagcttgtgctcctattgctgagactgctcacctttcctcatccatgccccatgggatgaggaaccctaggnggtgaataaaggctgcagtctaactgt

SEQ ID NO: 287 - DNA, 329 bp, homo sapiens
  misc_feature (1)...(329): n = A,T,C or G
cctggcatttaaagttcaggaactgnngggncaccgccttantggccccagctttccgcttttgcccttttccttgnaaaagnngggaaagccggnccctgnaggaacccctttattnaaagaaagcacgatggtttgggcacccatggctttnttttgtaccgggggcttggganggaaactttaaagaaaanggggccctncatntanaaaatcttnggnttnctntcgaatctttgggaaccttttccccagccctntccaanaaacttgnggggaggccccaataaaaaaaatttnttgngttccatttttcccaaaaaaaaaaa

SEQ ID NO: 288 - DNA, 238 bp, homo sapiens
  misc_feature (1)...(238): n = A,T,C or G
ctgtgactcagggaggactcttngcctgccncttaatcccnggaaganaacgccgctttggaaccntcaactggaagtcctggaanntggacttcttgaaaaacttttngccagnaaaaacagnaacannntttcattnccttttaaaacaaggaaagtgggcccccttgggaaaccncaccggggaaggggccgntttttgggcccccccngcccttggaactaacggaaaaacccc

SEQ ID NO: 289 - DNA, 212 bp, homo sapiens
  misc_feature (1)...(212): n = A,T,C or G
gctctccgctgaaacactgtgggatggcactcccggactgaaggctgaacagcatacggcaacagatttctcttagaggaagagcctggangaatgctccatcctggtctttgtaatattcaagcatataacaantnaagacgtatncctggtaaattgtnaaatngancacctatgtttttnacccccaatcttcacaagaaaaactgtaa

SEQ ID NO: 290 - DNA, 298 bp, homo sapiens
  misc_feature (1)...(298): n = A,T,C or G
catgggatgctgtcacttgcctaaggctcaagatttgactctgaagagtgagtgattgagaatgaaattgagaggatgcccaggagaactgcaaggtgtctaacatgatcaccatcactctattggtcaatatctaaactcaggcaactgaatcctgctttggcaagatgcccaaccagacagtctgaagggatatacacctacnaaacaatgaaatcctaagataaaatggactttcagaatgtgctcacttagacttcaagtaatgacagaaccctncntaaaccccaaagcaagc

SEQ ID NO: 291 - DNA, 325 bp, homo sapiens
  misc_feature (1)...(325): n = A,T,C or G
tttaaaagttccaaaaactnggaaggcnttcntgggggtccgaagaaaaaagggcccaaagtttggcnnccacnttacntgggagaagaacttggcccattggccaccccccttggggaggggcctcaaaaaaacaattttcggaacaatggcctccaagttcattgggcccaccggggcaaggtnggaccttggcttggattggcccttaaacccccccaccattggttggttttcttcccccccttttccccttggattaaaattccaaaagnccccccttggattttttttcaagccttggggggccaccaaaaaaaataaa

SEQ ID NO: 292 - DNA, 233 bp, homo sapiens
  misc_feature (1)...(233): n = A,T,C or G
aaatgggaacaacctgggaggaggactcangcncaaaaaggcccggggaggccctccagacgttcttaaaaacaccaggaaccaaggaatggggaaatggatggcttaccttaaaaagggattattgtaaagagtaaatacgttaaaaaacagagtccagtttgtgcagagacttatgcataaaaagcattttaataaaaggggncccgttcaaccntttggaaaaaaaaaaa

SEQ ID NO: 293 - DNA, 235 bp, homo sapiens
  misc_feature (1)...(235): n = A,T,C or G
cattttaaaggttcaagnaaacttggagtgggagnggatgggggcccaaaagcccttcttggggaagccaaggccgggttaagcnttgcccatttccgtggtggccacccttttcccaagggaaattaccgccaagggggccgccttgttggggggnaccaaaattaccaaagccttnttgcccanggccgggnaaccnttnaaanggaagccttgctttgcaaaaaaaggaaaa

SEQ ID NO: 294 - DNA, 114 bp, homo sapiens
  misc_feature (1)...(114): n = A,T,C or G
ctaccttgcattaaaggttcaagnaaacttggagagggtttttggggaaaaatttttgcccattcttgccattggggccaaaaaggaccccacccttttcttcttattcttcac

SEQ ID NO: 295 - DNA, 259 bp, homo sapiens
  misc_feature (1)...(259): n = A,T,C or G
ctttgaacaagcaaacttcctggcagcctctactagctgagnaatggctgcccgttgacaatgagggaaggaaggaggcaactggagtttcttacacctgcaagaagaacttgaaaatctgccccaggganccaatggagctnggaaagaaagaacctcaccctcaaaatgaaaactgccngaatccagaatgnacttttngttttaacccttttggacacccccagncccagnggcccccccagaaaaaccctttgta

SEQ ID NO: 296 - DNA, 305 bp, homo sapiens
  misc_feature (1)...(305): n = A,T,C or G
gtgtggcaaggcaggcctgaaatgaccaattcaaagtccctcttgttgctactgaagcatgtttgagacctgcgaggaggaggaggcctctatcanagcaaananttngnnnnngtttccantnnnaacnttctttacgggtgtgaaaaacnccctttattttcaaattnctcncagccctgggctcaaaaaaaagggggggaaattcccaagggntggccccccaggnccaagggggaaaaaactggggggggngccccaaanacccccccctcttaaggtnttnaaaaaaatgttggtggggg

SEQ ID NO: 297 - DNA, 329 bp, homo sapiens
  misc_feature (1)...(329): n = A,T,C or G
tccaagaaaaacttggaaggggtcctttnctaaaaccacaaagnaagcctttnccctaacccccaacttgggtggncttgggggaagaaaaaatttgggatncccccttccaaagcccccttcaagaattggggcaaanggggtggtggttcccattggggggcctggaagtggcccttgggggccaagcaaattcttggggggacccttaaaaaaccanccatttttttcgnggaccaaggggantggcttcttattattcaattcccccctttttttggggccggggcaagccggtggaatgggttaaaaacccctggcttttgggg

SEQ ID NO: 298 - DNA, 227 bp, homo sapiens
  misc_feature (1)...(227): n = A,T,C or G
gaagcttctctaacacacggatttccgccnggaagcncatcacagncttntcatgcttggnaacaccaganngctcttntgngctntgcttgggaccatcttaaacagtgaaatcactatcnaaaacacaagttggtgacaaaccatggcacttaatatactggtggaaaaggacaaatgnttaccaccggccaacctggaccaggaaggcaaaccgttgttttctt

SEQ ID NO: 299 - DNA, 508 bp, homo sapiens
  misc_feature (1)...(508): n = A,T,C or G
ctacctttcatttaaactncactaacttggangctttaccaccgaacccaccattggaaaaatcccacgagngggaagccttgggnaacggaaaccccttggcaanncccttggtgctcgccattcccctttggccccantcctgaagggnnaccaatccaagccacaaagaaaaagcncaccaagggtcngtgggcaagcnttgncnaaaaagattgngnatagcccnttttggtggccccatggccncccaaancccttccccaaaagggggctagacaanggtanattanttgggcattgccatccctttntccnttttcccaatactctccccaaaggcttcttcggctaccaattttggacttaaggggggtntttggaaaatggggtgagtaccccccaaaaaatnttncaaccggttggccttgggaaaaaaaaatttgtggggaattttccccccatatttaattngggggcaaaangtcntttggggggaatggggaaa

SEQ ID NO: 300 - DNA, 168 bp, homo sapiens
  misc_feature (1)...(168): n = A,T,C or G
aacccttgtggaatagattacatcgtcgtcccccctttactgtgggggggggngaaatgacctcnatgggncatgatcataanantagcccgccgcngttttattnncagaacgatgngcttgtanntaatgaatgagacctcaagaaagcaacgggggggaacgggg

SEQ ID NO: 301 - DNA, 338 bp, homo sapiens
aacacacccttcaaagtgctaatgctgttccagctcagcagacacctcgtctcgggaaagccattagaaacccccaaaatactacatttttctcctgagctttgaaccctgaacccagcattctgagagtgggaaccagaaatgtgcatttgaaaagactccccaggcaattctgatgaggagccagtgagcctgctgaaccaggtgactactgacatctcttctttgagtgactttcgaccatcccacaaatgtctgctcgacggtgtcctggaagagctgggtcatggctctcattacacactactcagcatcatacaccaggatttaccttctcg

SEQ ID NO: 302 - DNA, 275 bp, homo sapiens
  misc_feature (1)...(275): n = A,T,C or G
agactatggcccttctggactgtgactcatagactgnananagggccantgagggggggcgttataactnacatcatannttcagggggggcccnactgtnacaatgtnactngaggaacaggagccctctcacgaaccttcctttggtntcccaccccatngnntgntaaantnnngcctaaacgcgccatcatgccaagaagcatganngcaggaacngacgctccagaggacagtttggcnactcttctcggtgncccgctcccacaatgaa

SEQ ID NO: 303 - DNA, 234 bp, homo sapiens
  misc_feature (1)...(234): n = A,T,C or G
gccaggagtcagccccaggtcagaatgctggtcagcagcagactcacatcccagccctaccttcctgatacctgatgtggtgctcanaaaaacaaggaatcccaggctgntacccagtgtctccatgtgccctccacagatgcactcaactgncctctcttctggntcttcctcctacaaaactgggccaacntgggaaatcagaacagnagacttttgggatggagcatccca

SEQ ID NO: 304 - DNA, 354 bp, homo sapiens
gagccgaggtgacgtacatgaacatgaccgcttacaacaagggccggctgcagtcctccttctggatcgtggacaaacagcacgtgtatatcggcagtgccggtttggactggcaatccctgggacagatgaaagaactcggtgtcatcttctacaactgcagctgcctggtcctagatttacaaaggatatttgctctatatagttcattaaaattcaaaagcagagtgcctcaaacctggtccaaaagactctatggagtctatgacaatgaaaagaaattgcaacttcagttgaatgaaaccaaatctcaagcatttgtatcgaactcgacccattatcctctggatttct

SEQ ID NO: 305 - DNA, 341 bp, homo sapiens
gcacctgacgttttcaaggaggacctggcagagatcctcatgctctctcactgccctcatgacgtcctcccccagcatcccttccatatcctctctgttggatgccacatacgacagcaaggtcaccagctccaccttgtagatcgcctcatccaggatggacatgatccttttggcctcaatggtgctcatttgggtgaacaagataaagcccgtggaactaggattgaggggaaatgcatctgactctgacgacaaaaatgactggagaatctcttttccttgaatcctaatatgatcatttcatgtcctttttaatgccaccaaccttgggggccccc

SEQ ID NO: 306 - DNA, 222 bp, homo sapiens
atgaaagacagtgaaatgaagagttaagcaacatcagcacctctggaaaggacttcagtatgtgagagtttggaatttgaggactttatattgtgtcagatctcctttataatttaaaatacagaagatatcaaaattggatttagggtcattttgatctcctaataattcttgcttctctgttgctaaagagaaccccaaaataaactcatagtacaaaca

SEQ ID NO: 307 - DNA, 338 bp, homo sapiens
ggtggtggcagcagaatagaaaggatcagatacaacagataacactgaaggaaaagatctacgacttcagaaagtaaatatttctaaaagaaatagagaagttatgaagcacagattttattgcagcggactggcagtttttactcttagggttggccagctagtaaatttattgcatacctgcgtgtgtctgtggctttcgaactctgaaattgtgcattgactccatgaacaagttaatactgtgagactgccaccctgtggacaaaatatcaggactaaaaccatcaagaattaaagtttcattcatttgcgatttactgtcttagaactgtcca

SEQ ID NO: 308 - DNA, 260 bp, homo sapiens
gaaaggaaaaatacgacacatagccatgattgaagacgtgtaccttcatctgagaagacatctgcaaatattctggtcactattaaactttaaagaagaattcactctgctgaacgtgataagaaacagaactcagaaagagggacacctagaggatgaaaacagaagatacaatttcagttgctgataatgtgatattatgcccaaattattcaaataaaaaattcttagaattagttgaattgaatgactaaaaaaat

SEQ ID NO: 309 - DNA, 328 bp, homo sapiens
ttctgttggggagtttctagaatccctcttccactccccagaagagcaaaggaaggcttggaagggtagagagactgaggaatcaccttcaacccggccaccatcaatcaaatcaaaggaaaccacagcacctacccccagagccctggctaggcggagatttataatcaatttggccttcctcaacaagcagaatatgttgagtagatcatttctcctctgatcagcctttctcaattaatctcccacaagcctcacaccctgttgtgtgaaagtattcctggcttcaggagttggctccctgctctctctggatgggcctcaaatg

SEQ ID NO: 310 - DNA, 255 bp, homo sapiens
cagccccctggtgaaggacccctctgtccagggagaagtcaggagtgaccaggacagcgccagggcacatgcgggacaaaggcccctgggctttctgccctcctccctctgtcctgtgcctcttggcatcttactgggcctagcggtcaaactcccgagaagaaagaaggaaggcaatggatttttaaagttcagatctgttttctcctttaagttgtaaaaatacaataaagataaaactctcaaaaaaaaaaa

SEQ ID NO: 311 - DNA, 251 bp, homo sapiens
  misc_feature (1)...(251): n = A,T,C or G
acatagggcgtcactatgttgcccaagctgatcttgaactatcctcaggngatcctcctgcctcagcctcccaaaatgctgatctcactcctctataatttgccaaagnatcatacatgtgtgaagggaaaacgaacagaaagacattctcatactggaaagatttagaaggcaatttacacatgtattcttcttaaaaaattacttgaataaaattacagtcttttaaaaaatgaatcaaaacaaaaaaa

SEQ ID NO: 312 - DNA, 530 bp, homo sapiens
  misc_feature (1)...(530): n = A,T,C or G
gtccccacttgaatcactataattattgaaaatagcagctgatacgtaccaatataaaactgaagacttgctatgacccaggaactctgggaagcatgttatgtaattgcatctgccttccttgctggactctaagctccttgaggacaaagatgtatccattgtgccacttctacattctccaagcctagcagagaaccaagaactaagggctcaaaaacatgtgttgaattaattaagaatatcacaacaaatcctctgaaaaactcagagataagtgacatcatcatccttattttatagatgacaaacctgaaatttgggtcaagaacacagagcctgtgggtgacaaacagcaatccaaaccaacaatcagattcccaaacttgaaaactcatctactctgcctcactgatcaannttgtttgccaggttcaccataaaagagttggnaacnatnggggngngaggagagagacacaagggaaaacatcccttgcttgagacaccctcttcttttttactcactt

SEQ ID NO: 313 - DNA, 146 bp, homo sapiens
gaatgaaactgcctttggatgttgcaatgggaccctaaggaatgtcagccaaatccagaacaatgccgagctgaagatctaagtctccatattccgcaagcatgacttttcgaatacaatttaaaatagaaatccaaaaaaaaaaa

SEQ ID NO: 314 - DNA, 150 bp, homo sapiens
  misc_feature (1)...(150): n = A,T,C or G
gaaaactcataaggactcctcangagctccaccaaggaaaaaggaccaagtcacgttaacaccaagacaatcctcaaaatccagtgtgaattcttagtctcactgacaactcttacaataaaacaaagccttccttcaagataaaaaaaa

SEQ ID NO: 315 - DNA, 259 bp, homo sapiens
  misc_feature (1)...(259): n = A,T,C or G
ccaacactaacatcctcagctcccttgaattctgtgaattctgtctgcagaatgtgcttacaaggctgggagacatcggcctgcttcagatcaggagctggcatgccctggttacccatggcaacccagctgcacgggagtgctggcgtttgtaaatgtgtgtgggcttaaaattatattattgattctgnctggaagaagatagnctgatttggatatagctctgaataaattactccttatcctttaaaaaaaaaaa

SEQ ID NO: 316 - DNA, 308 bp, homo sapiens
cgggtgatgcccgttttcattgatgaggattatcttcttcagcaatgactgcacagcctgcaagaggcctgttttggacattagttgttaatgggcagagcctcaggaatacacttctggagaaagtccactgtcatagaaatgaaaaactggctcctccagatcacctttcagcagcatattaagcttttggaaacatcaatcaggagacagaaaattgatctttcagcttttgagggaatgtatcatcttgagttagggagaaactgccctggatggcccaagctttgctcctgtctcctgtggaa

SEQ ID NO: 317 - DNA, 637 bp, homo sapiens
  misc_feature (1)...(637): n = A,T,C or G
cgaagccttgctgttagcacttaccgagttctacgttctacaanatccaccactggatcttaacatacacgtaagatcaaatgctatagcatgtcaaacaatgtgtanctccanctatacaaacattactgtatctcattggggatacgaagctctacncacttgaagatggggaaggaatataaaaatctatgtctcacagtccagacttggagtacaagnaataagaagaataataacttaatcccttaagtagattcaccataagttagctcaagagcaattccagtgcaagtatggtctgtgatccantagtatcttacanacagcaagttgaacattgtgggatgcatgagctattgaggcctttgcagctttctgctacatggaggctanggccagagncaagatttatgctttgcagcacactggtcagctgtttttgcaaatcaagattaaatgatttttaaatgggggcngccaacatgggagatactaatgngnggttccttgngagctactgcataaagttaggaaattggaatacagaaagatgaaaagtgatttgcccaacatatagatcaaagctggggcagaaccaggactgggacctatatctctctactaatgggttttt

SEQ ID NO: 318 - DNA, 279 bp, homo sapiens
ctgcttctgccgccatcttggtacgggagcgagagccaggtgcttgacaggaccgggaaagtgtaaactccgcggctgacccggaacatccaccaatggcagaagagaagcgcttaggcgcggaagtgaaaaacccaatccctggagttaggaggcgggactgagactcagctggaggctgaggctcctgtcctctctaagcattctgggaaatgtagttcttctgccggtcccgggcatgcctggacaataaaccaagggcaacttcaaaaaaaaaaa

SEQ ID NO: 319 - DNA, 197 bp, homo sapiens
  misc_feature (1)...(197): n = A,T,C or G
gcccttccagactcgcaggagcgtgttnnaacatcaggttatgagagcgccttaccaacaatacacaaancgnggnccnncnaccttcgntcnttgggacatncccaatnctccnganctgngatgaaanctaangttgtgcttaaccacgattaanaattaaccttacttttccttacccccaattaactttttcc

SEQ ID NO: 320 - DNA, 227 bp, homo sapiens
  misc_feature (1)...(227): n = A,T,C or G
agacgctggggagctcctggttaaggcgaactganagatgtgaagangttnggcttggtatgccatcacctattcctgcgaaatacattgactactggaccnttttgaaggacgcgtttggcttagaggaggaataaccatgccagttttggtcaattctctatgatttacttctctcattttgccacatttactttagtagatataatttcattaaaaacaaaaaa

SEQ ID NO: 321 - DNA, 318 bp, homo sapiens
gtgatgagaactctgtatgggacacacatatcaacagctggtagacgacgcaggactccggagtagatgtggcattctgccttcatattattctcaatcagactggtgtttgagtaactcacaaagaagttcagaagccactgcgccagccacggaggtacacggctcaactctccttccagacagaagctgctgggaggagctccagctaccacagcagtcattctgaggctacgccttccccaggctgcttctagccaataactcagcacagcagggagactggaggtgggacatttctgccaacatgggacccgc

SEQ ID NO: 322 - DNA, 371 bp, homo sapiens
tgaatagccatggagctcctaaaaagaatgggacctttcacttgacctcccttctctcccttgcctactgcccctgagcgagtgcttcagctacagtctgggagccgaagatgcctgtgtttgatgcctccagcaccctgtctctgcatcttgaatccagccacgtgaccatctcttgcccacctttggccaatgtccctgagacatttcaagtgcatcatgctgcagactggtgttgctgtctccacaataccgcgcttcccctgtgtccccatctcagtctttggtcccactatccacttcccacatgcagccattgagtcctctatttttcttccttaaatcttcagaatctggttgccaaaaaaaaa

SEQ ID NO: 323 - DNA, 255 bp, homo sapiens
  misc_feature (1)...(255): n = A,T,C or G
tgggccctaaattgcattccaaagaccctgctcctggaacagccttatgcaatcaacacaaactcttggaggttttactgcntctggcactcgganggtgggatgctntcactctgnccctagcacaaagagcttgtnccntacacgnncaggnnnttcnacncncgacanaataattggatttcangcatgnccntcnanggagagcgtgagttttaanggtaagncttgcnccnaaagtggcagagctgaaat

SEQ ID NO: 324 - DNA, 102 bp, homo sapiens
  misc_feature (1)...(102): n = A,T,C or G
ttggatttcaggcgagccaatatnaggagagtgaacctnaaaggntaatgtcntgtgcccaanatcacaaaagctgancattgtaacacatatctgcccgat

SEQ ID NO: 325 - DNA, 110 bp, homo sapiens
  misc_feature (1)...(110): n = A,T,C or G
aacgcttgaaggtcanaatncaaggntcatcaccctgcctgnaaggagcctgatctcattcttatgccatcgtgaggtgctaanaacacatatnaatcacgcatggcctg

SEQ ID NO: 326 - DNA, 107 bp, homo sapiens
  misc_feature (1)...(107): n = A,T,C or G
tactgccactgaacctgttggttgcngagtttgaagaggtccaacaaaactctggnngctggaaggcaatgataacaggtntacaganaaagaagtcaagagcatct

SEQ ID NO: 327 - DNA, 190 bp, homo sapiens
actgaggatctgatgacttgcaacttaactaaggagaagaaaaaatcaagagggacagagagagaaacagataatgttcttcatagatctctttctaactgtgtcatcctgtcattgaactcccagaatttctcttaaagtgatgccttaagatcatgggaaagatcaaaattaatgaacaacaaaaaaa

SEQ ID NO: 328 - DNA, 197 bp, homo sapiens
gtcaagaggcttcaccagttccttgtagaaagaaacacacagaagaaacaaacacaacagcctgcagtggagcgtccttctcacgtgtgtgttactcagtgaagagagccacgtacccaactccccgttttccttcatccttcaaagcagccctcgatggaccgacttcccaattaaaaacaaatccaaaacgtgaa

SEQ ID NO: 329 - DNA, 174 bp, homo sapiens
  misc_feature (1)...(174): n = A,T,C or G
agacacagccttgctctgntggccaagctgggggtacagggggatgatcatancncaactggcaccntgaactcctggagatcaagcnganccttctgcctcggcttncaactagctagaactacacnacttggcancccnnaagggttanttttaattttttttttaaaaacc

SEQ ID NO: 330 - DNA, 139 bp, homo sapiens
  misc_feature (1)...(139): n = A,T,C or G
aacccaagccctccacaccnncagtggggccanctgnacaggagcggccagaaagggagagggccncggggccacngcccttntccttactctcagttcctgacttnattgtcacatcatggcgagtaacaggacaacc

SEQ ID NO: 331 - DNA, 233 bp, homo sapiens
  misc_feature (1)...(233): n = A,T,C or G
tgttagacttatacacgagtgactttctgtgacgcgncccgcatgnnccctttcacgagagcactataaggantanccccgtgctctctggtacacctcacatacttgcttggcacacctctttcctctcatcaccgcanaatgccnangacgaaagaaaggtgactctcatgtagccatgcacaatatagctnantaaatcnatacccatatctanccattattttgtgtaa

SEQ ID NO: 332 - DNA, 433 bp, homo sapiens
  misc_feature (1)...(433): n = A,T,C or G
ctcctatatgtgaagagtggaacatcanatttgaagcctgatcgcaacttgaaggcctcatctaatcacacagcttgtgtgcctgggccctgagtggtattggcctaaagcataatgcaattcaccctgcatttacattcctcttcatctgatttgccggagaatctggatttgttaaggatctcagcttattttcctcaggcagatgctcttagtttctcagcaatccagcagtggttacagagcctgggtctgtaggagatgaggggcccagcactggagggggggctaccttggaagacagctcctcccatccccactgatttttcaagtcaacgggggtaatggnttcacctagtcctgggggtttcttgaggccactgtgcactcantagcaccatcagtcctgactcccttaataagaagaaaaaaa

SEQ ID NO: 333 - DNA, 167 bp, homo sapiens
  misc_feature (1)...(167): n = A,T,C or G
atcatatgctcactgtaacctcnaactcctgcgctcaancganctttctgcctcannctcttgagncnntgggactacnaggntatncaaccatgcccagctangatgntaaaatttaacgtctatacncactatctattataaatgttgattcctaaaaaaaaaaa

SEQ ID NO: 334 - DNA, 119 bp, homo sapiens
  misc_feature (1)...(119): n = A,T,C or G
tgaggaaaaatgaccccganaagcttttccatggccanatttaccatngctttattgattcaaacattttaaatnntgatctttnggagatgtgggaaccntatctcggtaagctcttc

SEQ ID NO: 335 - DNA, 129 bp, homo sapiens
  misc_feature (1)...(129): n = A,T,C or G
cacagggactcaagctcaggctatttcaagnatcancctatggcttcacagcccttgccgatcaaaaactgcgagaanaaacctgaacagaattggtggatgagcctgccaatatcttgcgcacaatgc

SEQ ID NO: 336 - DNA, 251 bp, homo sapiens
  misc_feature (1)...(251): n = A,T,C or G
tcaggctatttcagcatcancctntgccttcacagcccttgncgatcaaaaactgcagaacaaacctgaacagaattggtganagcctgccaatatcttgtgcctcatccganagggaangaagctnaacagtntattgctgactatgagctataaattggtcataagatcttgttagataaagaaagctntctnatattcttagcttgctggttttttaaaaatcatgaatggatgggattgctttcaaa

SEQ ID NO: 337 - DNA, 164 bp, homo sapiens
ggaagcacgaaagggatgggaaagggaagcttggggctttcattataaccatttgggaagaagtaagccaaggaccaaaccaaacttccaagcaacccaaaataaactcttgtcttctttttaaagtgtgttattaaaatggacttgcatcaccaaaaaaaaaa

SEQ ID NO: 338 - DNA, 156 bp, homo sapiens
  misc_feature (1)...(156): n = A,T,C or G
gctgtccagaactttttccagaagttgccggacgtcgggncaagncgnctatatcacctcnggngaagggattactgccncctngccgcntttnaangaccgtcttatgaatnanncttggcttttccccaagnggggatcgctttcccaaaccaa

SEQ ID NO: 339 - DNA, 178 bp, homo sapiens
  misc_feature (1)...(178): n = A,T,C or G
taaacacccttgtgatcatccaanncagtggcgagtatcaggcagctnattcntnttattnctcaaacggggggncnggggggttganggnccacaaaaanactanacctacngacnnncaagaggcatntgctgctgtttccaacttggagctgttatgaataaagcttgctacagg

SEQ ID NO: 340 - DNA, 162 bp, homo sapiens
  misc_feature (1)...(162): n = A,T,C or G
agtgcgtgccttgtgaatgggccccggggagganaaactgaggaaaggggaggaagtacgttgcttgccgnaaagggaggagaaantgcgtggggagagagtcttaccnttttgccttgccgggttggccngnttgtnancttgagcccggtgactcacagc

SEQ ID NO: 341 - DNA, 328 bp, homo sapiens
  misc_feature (1)...(328): n = A,T,C or G
gatccaatgatccaactccagaaaaactcactgnatcgaggtgaacacagnctctttaaagctcttgccaacnanctgctggncactttttgctgatngtcattcangcactttgacaccggnncctgaagctattatcacaagnggcctattccatacttnattcaacttttggggagncnaccaangngggtacaaggaccgaatgtaatcantatcccaacgaaatgcaaaacgaggangcgcctaggcangaagcatctttganaggttgtaccnggtatntaatacaccatggaaggtctgnntttcccattttttttttttt

SEQ ID NO: 342 - DNA, 175 bp, homo sapiens
  misc_feature (1)...(175): n = A,T,C or G
ttgactcatgaagggngagctgtcagtggttgtgccacaagcctttgggcaagtccaggattncccancccnactttggacacagttgcctttgtnaaggctcttgngttgcctctgaatttatggggagaangacancaagtctggggttactggcccttgcattaaaaccttt

SEQ ID NO: 343 - DNA, 645 bp, homo sapiens
  misc_feature (1)...(645): n = A,T,C or G
gatgagggaaaggacaggccatggcngaaaancccgnccgctggagcgcagcaccaacagcttcagttactcatcataccacaccctgggagggagatatatagctggtatttgacaactttgtaatgggancattcccggatattgtctcaaaaattcaagattgggcaaacangctttttgaaaaccagtccattcttgtccttgaaagttcaagncactgggaggtttctcgggcacccagccatcttgggatcggaacacttgggaaatttcactncccggggaagtgggatcacccattgccacccgggcatcttgggacttgccaataaagaatttgtcaagtggattatgggcaaaaagaaccggtggtncttgacaagacatacttggaagtggccatgggaacatctttcattaagaagctcgntcacaaaaacccttgatgggggntttngcttttttaaccccacaagccaattgaaacccggctttaattgggcngggaaagaacaaaaggttcccattcaanaaccttgggaaaatnnttttttgncattcgggcnggngggaattnttcaaannaaggggaaaacntgggaaaggtcngggttttttttggganggggaaaaatggggttt

SEQ ID NO: 344 - DNA, 182 bp, homo sapiens
  misc_feature (1)...(182): n = A,T,C or G
cctggagtattgcaccacccaccaccaccaagctaatttggattttttgtaaggaaggatggggggatctcaccttttgtttgcccaagaggcttgggtcttcaaaactccttggggacctcatngccggatccaaatttaccttttttcatnattaattggaccctttctcgttacctaat

SEQ ID NO: 345 - DNA, 170 bp, homo sapiens
  misc_feature (1)...(170): n = A,T,C or G
cctcggtttccccctgggnctacctgcttaatcagaanctgaggctnttcagtngatgttcantagtcanacaggacaattaatcagcaagtnnaaaattgaangaagatctgcatcttactgcnggagntcnttaaaataaaagcngatttggcgccattgaacattca

SEQ ID NO: 346 - DNA, 266 bp, homo sapiens
  misc_feature (1)...(266): n = A,T,C or G
gtgggaactgagctcgcaggagatgcatttaaaaaaggatcccagggctgcccactctccanaaagttccacccaccctggccattggaaggagacagagaagcattcttcactggggcccagagctgactccttcttgagcgggtcaccctggttatgcataagcttcaccnnccaaatgaaccatcnaaatggtgcgccatttaaatgngngctatggncngcctcttttggtttttacnctggaagaaatactcataagccac

SEQ ID NO: 347 - DNA, 211 bp, homo sapiens
  misc_feature (1)...(211): n = A,T,C or G
gtgagaagagcaaagtgaaaaaaataaccaacccgaaagccaattcatctgactcgggcctggctctgctcatgacatcgtcatggatggaagctcccantggctggatcacactggaacgcccaccccaatatttattttctttaggtttttcccagaaggtggttttcaaggaaataaaacaagcatcttcatttgtcaaaaaaaaaaa

SEQ ID NO: 348 - DNA, 281 bp, homo sapiens
gtttaccttccttgtcagcttgtgagcaccagaaggcagcaagttctcccatgcatctaatcttttgtgcgtagcacatgggaggaggcgatctacaaggatgcatattaacaggacacgccaactactgcaactaccatggaacccagccggatttccctgtcttctgcttccttcttaaccctcccactgcttcttttaccttcttccccctttttataactcagtattaatttcttaaaagtgtataaaggaactgagtggatatgtaaaaaaaaaaa

SEQ ID NO: 349 - DNA, 278 bp, homo sapiens
gataagaacactgattcccagccatggtttggagttgttaggagagctttctgatcatccaaggactcttaaggaattcgccattttaagtcctctgaaaaaaatacaggaacttctttacagaggaacatgcggagagagagaggagaaccaccttcttatggaactaccattttaaatctcaatctatcatgaatgttcggtattttgtttccaccgagaggggaaaatagctttaaatataacttccaggcctgctagatattcaaaaaaaaaaa

SEQ ID NO: 350 - DNA, 286 bp, homo sapiens
tactcccttgacgacagaagcactccctcacagaaggagccgtccacctcccagagcttccttccacagtgcaccaaggcaatgactcagcacaaaaccaaccaccaggcccccccacgtgccctcctccccaaccctgaactagtttcagcaatggaggagaaagagcagccctggtggggtcactggaagacgaggcgccaagaactcctaggtctgggaacccatcaaacccccctgccaagaaaccaaaccgcacacataggccttcaaaagcatggagact

SEQ ID NO: 351 - DNA, 332 bp, homo sapiens
aatccaagctcacatccaggacggcgctttccaagaaaaagcaggatgtgaaccaatgcagaacacatgccttcacctttccaaagctacagacggagaccttgccctccccggtggccagagccagggatctctgctccctggacttccaaaaggggaggacgtcggtcaggaacagcagctgcagcacagccaggcttctcaggtcatcggcatccctgcaatccacagagcacccacccaaactagcgactaaggaggggcgaggacaaagtgggccattcgtaagaacctataaataactcatcctttggagtccgaaaaaaaaaaga

SEQ ID NO: 352 - DNA, 261 bp, homo sapiens
gattgcaggagcatgctctttcttaccacatggaactttcactcatatttccagtcccccctcttcagaattccatcctaatgtagcatatctggtgcttctacgtcctgttctgatcaccccatcagcccctgcagccgtgtgttcctcaactccaagtgtttaaaaagagagcgttctggtttatcgttccagtgatacctaactggtcaaacaatgtaaacaatacaatgtaaataaaacactgccaaataaaaaaaa

SEQ ID NO: 353 - DNA, 145 bp, homo sapiens
  misc_feature (1)...(145): n = A,T,C or G
gggattggattttttcaaggaaanaatcngaccattatgaanganntgtatgttactcatcagaaannnctacccccccaagcccttgggatttgaagccctgggggatgacccgggggtttggcaaaggggaagaagctgaaat

SEQ ID NO: 354 - DNA, 280 bp, homo sapiens
tatcatattggatctcaggagagaagaaatactggatcttttttcccaagacgtatgagagaaaataggaaaataaagacaatggaagaccagttctcgagatcattttcaatctggctttgcctatctgtctgtggtcctcaacacggcatcagtatacttctctccatctgcaactttaccagaacaacataataatgctaccattaatactttgtccaagacactgtgctaaattagcaataaatatatatttactttaatctccacaaaaaaaaaa

SEQ ID NO: 355 - DNA, 111 bp, homo sapiens
  misc_feature (1)...(111): n = A,T,C or G
tgtagagggatgaactcnctnacacccaggatttgttgtttttcaggggaaaagnaaccaantttatccnncactgaaaantttctgaantaaaaaatgcagtttcattga

SEQ ID NO: 356 - DNA, 397 bp, homo sapiens
  misc_feature (1)...(397): n = A,T,C or G
atcacttcctttaagggaaagccagctgccatgtggtgagtgtcaggcctcttgagcccaancnnaactacgggggngncctctgagaggggggngggtacctccntnctngatgggccgggaangnnacntgnnggaatnccccanaaggaagnggaaaaaagaggcccnttaacttggatggncgnttcccacccatnggggggattttggntcctgcccccactccttactggnnatgaatatattcttccccctccacccccacttaaagaaagggngctttgcaaatattctccccactctcnggggaangggnangtgggnaaccccnttctccccncccctcttttgaaantaaantggnnanattccccccccacccccttttggggga

SEQ ID NO: 357 - DNA, 114 bp, homo sapiens
  misc_feature (1)...(114): n = A,T,C or G
tcaaatgaacctgctgtgttctagaacaacagactacanagtgcctgttttcagtgtgaaacctggaaagtgcctattatgaaagacaggatgtcagaagaccttcatgacaca

SEQ ID NO: 358 - DNA, 109 bp, homo sapiens
  misc_feature (1)...(109): n = A,T,C or G
gtagaaattcatgcctggtactggaaatgcggntaanactgatggctcaaatgaacctgntgngttctanaacaacagactacgagtgcctggtttcagtgggaaacct

SEQ ID NO: 359 - DNA, 432 bp, homo sapiens
  misc_feature (1)...(432): n = A,T,C or G
gagaggccacagctgacggatggggaaacccaagnccagagtgttngatggatttgaccaaagccacccanccataggcangaggtgcagagttgaagcccagggcatgtgattcccaacaaattattctttccaccagaccacatgattcttttggattgaggccttttctgctctttccaaacagaagacatcaagttgttttcagaggcagggaaaactttgctccatattttgagatcaggaggtgagaagaacttgagtctgaactctcttcttatagtttcttaaacttaggtaactactactggngactgacttttggaatcgctcaaactggccccaggatgattcctggggaanaaatgtcngggtgatagaccccaagagggccaggntttgggaaaaaaataaactttaagggccggccct

SEQ ID NO: 360 - DNA, 475 bp, homo sapiens
gaagccccccctcttgagtgcatttccatagctccaggatgaacatattcatgaaacttgagccaatgaaggaaagatacccatgtggattggaccaatatgcaaacttcaaactgtgtcattatatttttattttatgaacctccttgcttaacatctcatcccacccagattataacctgcacaaaagcaaagggaatttgttgttctctcttgttcatccctgcattcctgatacctagaacagagataagcaaatattaggtttttagaagcccagcagccaccctcactctgaacaagctgcctatttgttatgctgagtaaaagcatgatcacagcaacaaagaaatatcattacagagaatttagtctcatttgcaaaattttgcagcaaggacaaatataaccaatgaaacaatttgaagcagaagtttgtgagtttcaaataaaatgtgggtttaaagaaaaaaaa

SEQ ID NO: 361 - DNA, 206 bp, homo sapiens
  misc_feature (1)...(206): n = A,T,C or G
ggaggttggtgggatgctgatatcattantctngagctntctagnnntgtcctggctncctgcacantcnctcttatcaatttcatcacattgaanggggggggcggngccccnntnctacacaaaatgggttctcactctgttgtaagaaaaagggcggataanntcggnagttgttncatatccttccacctctggcccaccat

SEQ ID NO: 362 - DNA, 355 bp, homo sapiens
aaggaaaatcaagaacatgttccaaattctttctacggaacttcagaaacataagcaaaattcttctggataacaaatcatggcttcctatcaactctaggattggacctgctgtgtgtggtactgggagagatacagcaaagataatcaaatgtgaaccatgccctccaagagtttacagctctgtaggagagataaatgtagttaggcaccaataatacaaagtagaaagtgataaataccacaagaagggctgagacaaagtacagtgctggcaagttctggaaaaggggtggacacctagaaataatcagtgaagctatgagatgagagacagagagagagagaaagggag

SEQ ID NO: 363 - DNA, 237 bp, homo sapiens
ccgttgccactgccccatgtaagctcgaggagggagagatgtccgtcttcttctctgatgagtccccaacccttgaaccgctcctagcacacagcaggtgctcaagctgaaagtccgcacagaccccttgggagaggccttgagcacgcagcatctcatctcatcagagcatctcctttcgtgtgcgtttgattaaacacctggaaaactggcttatctagaatttaaaaaaaaaaa

SEQ ID NO: 364 - DNA, 372 bp, homo sapiens
  misc_feature (1)...(372): n = A,T,C or G
atacgcaactcacgaatgcgaagcatgcagatgagaaacccattaatgctattgttataaattcagtatctgacttcaatatcacagatggaccagccaaggaaaaccccaatgagaaaaaactgtcagaatccagcacatcactgtcctcccttgaagaatgccaaacaacattttcttacctccaaactgatacttcagttcatcacagagacactgatggtatgtttctcagaattcaacccatctctaaataaagctcccaacccccatcccctgtanaatcatcacatatgctgttnggaaaaaaaaagtccttatgaatattaaacacgaagacttcgatttgaaaactctgaaaaaaaaaaggga

SEQ ID NO: 365 - DNA, 330 bp, homo sapiens
  misc_feature (1)...(330): n = A,T,C or G
ggccttggggaaagaacaganggccanaagcctgggangtggatggcttggctancaaagcccgagggaaaccccaagaactggaagggcangggggatgcttttcttcctttcaagaagccctcccaagaaagggaaacccttaaccccttggccttacaccccttggatctttgggactttggcacccctcccannaaacttatggagggcnaattaccgtngttttttttgcttggttttttaaagcctggccccttgtttttttngtaccttttggttaacaagccaaccaattacaccctttttgaaaatggtgaaaaaaaaaaa

SEQ ID NO: 366 - DNA, 223 bp, homo sapiens
atattactcgatgaagatgtaatgtttggagctgcagcgatcattttggaatcatgaggcaatcaacctaagaatgaaagccaacaagttgaagaaagcaggacagaataaagaccctggattcttggtgacacttttggtttccaaaactactctgagatggccagctttgaacttaccaagtcaataatgaaagcttgtatggtttaaatcataaaaaaaa

SEQ ID NO: 367 - DNA, 111 bp, homo sapiens
  misc_feature (1)...(111): n = A,T,C or G
ttgaaacccctggggtagntaccncgcattaagtcancaactgaggnngaggnctanagctgcncttgggtgtttatncagccaacatgtgatccacatgaggaaaccccc

SEQ ID NO: 368 - DNA, 630 bp, homo sapiens
  misc_feature (1)...(630): n = A,T,C or G
ggggtttagcctacccncgccatttaaaggttcaggaaacttggagggaaaccnntgtgagaaccngcnncanccanacattaacttngcattnaggggcgcagctctnatcaatgcgtcttcncatagtggtgtgcnangatagggcgaacataggatatatggcgagaacgtgtgggtaatntcttatagagnagnganacaatgggnttggggtaaagcctggtacttanttatgccgtatagantatatactttgccaccagacccatgtaatattagaacctgtcaattaccaccctaattattgcgtatctatacaccaacatttttaaaaccaccggacaatttgagcnaanaagatttctcccnaagtgaagaaaaggaaagtacatatgtcattgtatgcacaccctcttcaatgcataattacgtgtcttaccactactttganccccctcacgtagtgcaancacaccgcngagagncatagtttacttatatgtanacgccttgangggatgcgcattaaccagtgacgtctatggaggattatttgtacatcatcgataaggttaatttaaacntgagtcgtcttttccatatattgcggaaataattaaaaaaaaa

SEQ ID NO: 369 - DNA, 488 bp, homo sapiens
  misc_feature (1)...(488): n = A,T,C or G
ccttacccccttggccctttttaaaaggttccaannaaaaacttggganagggttaaanaaangggggggaaagaaagttttcctttggaattggccccaaagggttaaccctttcccaaaaaaagggaaaggaaaagggaccccaatttgggttgggaaaaaaaaccncgggaaacccagggaaggaagggaattatttggccccnaaagggggaaaaatgggccttgggaaccccatttaaaanttccaagggaaaaagcccttaaaaaaaaagggaaggggcccaaaaaaagggaaaaccaagggtccctttctttctttcccctttaaagaaaagcccccttccccaaaggaagngggggggccccccttcccaaaaatttaattccctttttgggaattttgggcccaaggaaaccttttttcctttgggggggccttcccccaaaaaaaaattttttttttgggaagggaaaaaaggaaaaa

SEQ ID NO: 370 - DNA, 539 bp, homo sapiens
cgtcttttcccagtgcaaatttccaaccagaacactgccaaaacagaagaaaaacaactaaacctgagcctatcacattcaggaaagtctgaggacaaaggaatggtgcaaaatgactacagactttggaagagaaagaagaagtgtgagatggggtcgtggatctggcccacatgtgaatgactggtcactggtcgtctgccagaaagaaactgggtaaagcttaaaaaagctgaagaaactgaggttccaagtacttatggttgttcaagattaagcaaatagcaagctgcagaatcaaaatgtgactttcttgaatgcttttcctcaacaccagttgcgaacactggaagtattatatatgaaggcattggtgtatataagcatataaatcatcaccatcatcattaaaatgaataaactgacgtctttcatttcaagaaatcataaaaaggcagaatgattctcttaaaccaaaaaaagcatactgagtccctgctgcctttcgaaatggatgctgtgtcagctcaatcaagaaa

SEQ ID NO: 371 - DNA, 252 bp, homo sapiens
  misc_feature (1)...(252): n = A,T,C or G
tctttttttttttgtgcccccggcgtcnnggagggaggggcgcnaatggggcacccgnngtattttgtggantttaccacaccacaaagcctctttgtngattttccacangggaaatttacaaannnccnttntttncccctcgtggctcttaaaaagnctcttccccaaaaaaaagggggcgtggggggaattttattgagggggcggggggngaggnccccacccccacccgcccctgtgggggcccaa

SEQ ID NO: 372 - DNA, 737 bp, homo sapiens
  misc_feature (1)...(737): n = A,T,C or G
tacccttgccattttaaagtncaggaaaacttggagggcattcttttcccacttttggaaaaggttccttggagtcttccccttatttgggtctcaagctatttgggnaagnaattaaagagcttgtggggatccttggattttttggggaccaaanaatgccaaggaaaaatttggaaataccacattattttgttccanggggaaggatgggggggggggaaaaatttttggtttttggaccatccgtccaccaaggattggaaggggattaccaccaaanggaaggggggaaggtgcattcanaaattttggagaaaaaaaagggggaccattttcttcacccttggatnaattaaggtngggccanaccttttttggtttncattcaaaaattaccacggcttttttttttattattaaaaaaaataatttggaaggttttgccaaaccctttttttggttccaaaatgggaatgggaattggaaggaatnatttggccanttaaaaaccttcttcccccaaccggtccttctttttccccccaaggaacaaaagggaaattttggaaccntaaccntaatttaattttgggaatncaattnaaaaaaacccttgggaaggtntttttaaagggggaaaaaaccccttgggcctttttttttttccaattttttaaaaaaaaattgggaatngggcctttttgggtttttcctttgggaaaaaccaatttcct

SEQ ID NO: 373 - DNA, 408 bp, homo sapiens
  misc_feature (1)...(408): n = A,T,C or G
ccccccccttttttggaanaaaccccntcntgtgaaagcttncctagcttgttaagagttcnagaaaacttggaaagtaatttggtgcanancncatngtcgtgaaaanttggnaaaatatacaagggnnttncnttggtnnttattgnacaaaatggggacctagganccccttatggaaantgnaaatntttgccaaaggcaccttgggcaccaagtgtaaacaattattgcttgccanaancaaaccccattnttttcaangaacangtggttaagnggaaacccanaccttggtggnccagcaactttaaaacttggaccgaacacccttggaggggttggaaaattcgtttccttattttggcccacnaaccaatttncnttggaattctttcaaaggggggt

SEQ ID NO: 374 - DNA, 306 bp, homo sapiens
gattgtcaacactgtggcaattgaaaataacaggaataactgttttatgacaaatggacctgaaccctatggaatgaatttgcaagcactggcacagttaacatatgctacaaacaaccatcttcagacagtgtagcgaaccaactgtgccagacttaaactgacgaccctgaggtgaatcgttctattgccacaacatttctgatcttcaaggctctccatgctcctaaactcttttctttaatattctacagtgtgtttattttcacggctataaagtcatactcagatttgcaaaaaaaaaaa

SEQ ID NO: 375 - DNA, 293 bp, homo sapiens
aagacacacccagcttcctagagctctgaagcagcatttgatcgcgtgtggctgaggaaactcgagcttgtagctgataaggaatcgggaggagaggccgggagggcattcctggggtgcttggctccagctaccccattccaccagggcttcccacccctctggaatcctagcccggcccctgcctgcttttctcccgggtgaattgggagggctgccccagaggaattcaggagattccctctcttgtagcctggagaaataataaaaatattagcaggcaaaaaaaaaaa

SEQ ID NO: 376 - DNA, 215 bp, homo sapiens
  misc_feature (1)...(215): n = A,T,C or G
ggtcctgtggcaaggagaacagcctgaggaagaagtcctccagggtctgatgaagatggatggaaaganggaacanacnacagcgtgtatactgggccagaaaggcttgtcttttccccatgggataaaatcattttctggtggtcagattgggtggagtgaggaactgttatcaatattatgataaaattatgttctttgctgaaaaaaaaaaa

SEQ ID NO: 377 - DNA, 439 bp, homo sapiens
  misc_feature (1)...(439): n = A,T,C or G
cttggccaaaaccccttccaagggaaaagggaaccaagggaaggaattgggggggttttccttccaacctttctttggttttggccccccaaaaccccttggggttccttgggggaaaaccttccccccgggggcnccttccaaaaggccggaaattccccttntccccaacaccttttgggggggccccaaccccaatttcaatttaaaaagggaaaaccaatttcaaaggccttttccccaacccggaaaggggggggttaaaaaagaggggggttaaaaattgggttccccaacccccctttggggggtgccaacctttgggcgttggggtgaatttccccccccccaaaattggggccccctttggggggccaaaaccaaanggttaaccttttgggggggtcccaacccaaaaaaaaaagggttaaaagggggg

SEQ ID NO: 378 - DNA, 118 bp, homo sapiens
  misc_feature (1)...(118): n = A,T,C or G
ggaggccacagttctcaagggnaattagtctacagttccagccantncaagggacagntggaaaccnccnnaagcttagaagggagattttacctgaaanccctttaaagggcatacc

SEQ ID NO: 379 - DNA, 546 bp, homo sapiens
  misc_feature (1)...(546): n = A,T,C or G
aaatgtagcctggcaaaaaacgtggggtggcctcagcagaggaaatgctgccagctgaaaacaccggatgtaatcgagaccacaagagacacagacttagttataaatgtcgaactaaaaagagtccaggactggaacctgtttcacctctccttgcctaagggatggccctgtgtgacagtagaatgcagaagtatggctgagtgactttcagatctgggcctgaagaggctttcagccaatcaccctgtaaagaaatctgggctagtctgccttccagttagaatccacatggaaagagaggctgtacagaatgagaagctacacagaggagaatggaggcactccagtcaacagccagacaactgtgaggcatgtcaatgaggccatcttggacattcaatccccagcttgactcccaactgcatgcagctgcctgagtgacccacccaagtcaaatggacanaagaacccccacttgatnccagccacccangaaaatgcaaaaatttaagtcatttttaaggtttaagcattttttaagca

SEQ ID NO: 380 - DNA, 160 bp, homo sapiens
catcaaacatggagagcccgtgttgagatggtggaactacaagatgaaagcagcctgaatctctggttcaactgatagcagagagcctatgccaacccatgtctgtttttttcatgtgcaaaataaataaatatttattgttataagccaaaaaaaaaaa

SEQ ID NO: 381 - DNA, 310 bp, homo sapiens
  misc_feature (1)...(310): n = A,T,C or G
ctaggtctgctcaccccactcctggatactccattcttcaagatgncttactcacctccagccaaaactactatcccttccatagaccacaatcaaaggtatatcgagagacactattgcaatttggtggcagacaactagacaggccttcagtcacctaaaagtacttgcatgtttcaaagaggagactgtatcatccaactgatttcaagtctataatcaaattgatttcaggccacacttttgcacagttggtgggaatgtaaactgataacaaacattaaaaaaacaagattcatgaaaaaaaaaa

SEQ ID NO: 382 - DNA, 435 bp, homo sapiens
  misc_feature (1)...(435): n = A,T,C or G
gcattaaagatcaagtaactggagagcctggctggcctcccacattattgccgtganngccaaaaaacaangttcaaaatcccacaanggggcttgggangtggtaaatggggcggtggaatcttcngaacttccctttgnaaaaaccaaactaacttctgnttttttttggnaaattctttggcnttcttttaaccgnccaantggccaantggccgaagaaaggccattgggggggaaaangggcacccacccttgttggaaatttcccaaaaaaaaagccttggggatggggttattttttgggtancccccntttttttcccaccttggggganttnttgggaaaaanaaaacctttnaagttttnaangggaaaaagaangggnttttggcttgggcaccctcctccntttgggggtttttttttttaaa

SEQ ID NO: 383 - DNA, 446 bp, homo sapiens
  misc_feature (1)...(446): n = A,T,C or G
gactggtagttcatcttacatgggacgaaagtgttccttacgtgatcacctgcagtaacctggaatgagggtgggacgtggcctccgcagcagctgcccaaagaagccaggtgataccacctaaaagtgcatggactgaactcgccatgaggcaaacattgaccaataggagagaaatgagacgggaggaaggtaatggagcaatccatctctctttccccctccagtggactattccaacatgtcttttctgtatgtacagcctgtctggtattgtcctgtctgagtggacatcatattcttcacagttcatgaggcggtggccagcttggtaacatgccagtttccatttgctttccatccttctttctcttgnttccctgttccgtgtctctctatcccagaatatcacctttcaataaaaccttaccacttaaaaaaaaaaa

SEQ ID NO: 384 - DNA, 429 bp, homo sapiens
  misc_feature (1)...(429): n = A,T,C or G
gaaggggccaaagggggngccccggggcgnaaacaaacttggcccccgttttgggttngtggggggggnccaagtggcctccccnactttgcnttttccaacaattgccaatttggcaattcccttcnaaagtngggcttggcaccgccacaagcaanggttgccaagcaaaccacttgccccaatgttgcccgcccaagggaaatggggaaagttcaaagggaagtggaaggccccggaccttgggcttcttcgcttggggaaggggggcaattccttggaagaactcctttccttcatgcttgggccgcccgatgggcttgcttggggggggacaagccgccccttggaagcttgcaaacaaaaggggtgggggaaaaacaaaagggggccttggggaagcttgccgttttgtttttttgcccattt

SEQ ID NO: 385 - DNA, 284 bp, homo sapiens
gcagatttttgagaagacgacacagcattgactcgtgacatggcaagatgtaacgagaggtctgggccggtcttggagctgtgcagataaaagtaatcaaatgacactcctggaatgcaaattggcattcttgactgcagcaattgcacaaccatgaaacatccctgacagcaagcaagattagaacaaaatgttatgtaaagcactgaactcaagaactctcacttgaaaattcaaactgtaacacttatattttaatatagcaatagtcagcaaaaaaaaaa

SEQ ID NO: 386 - DNA, 297 bp, homo sapiens
  misc_feature (1)...(297): n = A,T,C or G
ggttccaaaatgcgtcacctgngtaacttcaatatcacctttgttcttcagcaaaatcgttccatacaaatgagtggcctcatgaacaggggcggcgtctctgaagaaagggccccagaaagacatccctctgcagcagcaccaccccttcctcgcctgcctccgctcctgaggatagactgctggtgggggcactcagaggaccacctcaccacaggcagggcttccacagacttaggtttctaaggaggatggcaaaccctaaggaagagaacgatgcnggacgaggcagcgcgg

SEQ ID NO: 387 - DNA, 116 bp, homo sapiens
  misc_feature (1)...(116): n = A,T,C or G
ttttttgttttttttttatttttnttctaagngaccccngccactacctccttaagtcacaactcatnaaaaccaaagctatncaaccnccccaattcatcaaacaatctatcaaa

SEQ ID NO: 388 - DNA, 174 bp, homo sapiens
  misc_feature (1)...(174): n = A,T,C or G
actcatcaaaccaccccacttacatttccttcataanattcctacacacctnnanancataaactcactttccatcnacttnctcaanntancntaaacccacaccatttcccnttctcccatcctntnccctaaattaanccatacccacctctttaatatacccactcctat

SEQ ID NO: 389 - DNA, 508 bp, homo sapiens
  misc_feature (1)...(508): n = A,T,C or G
tggtctgcagggagggcgtggtcatcacagacagcagggactgtcaccgatggaggctccactgtctgaggatgtcaacgtctccacatgtacttctaaagtcaccgtgacagggaaggaggacagggggagctgagcgctgactcaaatgctctcacctggaagggacactcactgcctctattcatacttcattgtccagtgcaagtcttatggccacccttgacgtgaaggcccgcgggaagataccgttcttcttccgggcccagaataaaagaaagtgggatactgggtgggacccacttgtggtccttccntggtggcagaatccagnatttgaggttttcttacctgaccttccaaggccgatcaagtttcccattggattggatnttttttggaaaatggcccntggggattangaaatntntaattttntttaacaaanccccctnttgnatnnnaantnggggangggnaatnttttttttaactgggctaaacacct

SEQ ID NO: 390 - DNA, 274 bp, homo sapiens
tcaagtgtggatggagacttgaaagccccgtactgcttctctctgacctacaatcccatacatggaacaagatcttcctagccttggctcggacgaaccacagcaggaaaaagagaggcaaggcaacttccaggacagctcaaggccgtggtttcatgttttctgcaccacttctcaggagaaaccaaatgattctgaagttgctggagtactcaaccaggccactctgtgagtccccacctcagggactagtctacacacaataaatttttgt

SEQ ID NO: 391 - DNA, 343 bp, homo sapiens
  misc_feature (1)...(343): n = A,T,C or G
ggaaaaaggcttccctttttcttcaaaggaattgccccattcttggtggaaaccaccatgggtaaggaagtcttcccaacccttggttccccaagattggttcccaacncttgggtcttggcggggcaacttggantgggggcttcaacaataatnccgaaantggaaattgccccagcttcttgctttngggccccgggatttaaaaaaacccaaancnaggggaacattcccagaatcattgaaaaagaatggggcnaaaatggcttgantcccccnacaagggaaanccacccttcaaangcccccatggaatggtngttcaaagctttgggaaagaaaa

SEQ ID NO: 392 - DNA, 283 bp, homo sapiens
aactgaaaggggcacatggcagatacaatcataaactttcatttcggagagcagtaaaaaaggagaagaagaacacactggtactccaacaagtcatagtttctgccagatgttgcaaaagtgagttagataactgacctttcttctggggcctgtgtcaactttgaatggagctttcaattgtacaataagcatctggacaagttttgacatctttataacactcttggagttcttaaaaagctaccattttgtttaaaaggatgaatttattgtggaggat

SEQ ID NO: 393 - DNA, 311 bp, homo sapiens
  misc_feature (1)...(311): n = A,T,C or G
ctctgttagaacaaggcaataaactgcgtaatgccatggtgatttctgcaatgaaatcaagcccagagaccagcatgttgttggaccaagttcatcctcctattaatgaagattctcttagagcatcaacacagatcagagccttttctaggaatcggnttaaagaccacattgaagatcacctcctcccttcaactgagaatacattttggagacatgacacaaaagctgataccagagctatacagctgctattaggcaggaaattgcgggggacccagaacagccaaaacaatcttgaaaaaaaaaaa

SEQ ID NO: 394 - DNA, 579 bp, homo sapiens
  misc_feature (1)...(579): n = A,T,C or G
gtggggtctttcagtcctcctccgagagcccctgcagccgtgaaggaacactgtgggaaatgccggggagccacccagaaggttgaaagttaactgagctgaactttggatcctagattcagctaggactccgaggggaccacaccaccgcccacctgcatctggggatgttgcagctgttttctctggaagtcagcccccaaccctggaaacacactcgctctccccaccccagccagtcacctccagccttgacgtttcccaccccttccatgaagactcacaggctgcctgccagaggagtgcattgaccaccgccccccacctgccattttcccgagaaactcacatgctctgcctaaaaccctatcaaagttgggaggaaaagaacccacccgcttgggcctgagtcatgccacttcctcatttcagaaaccccaagccctggcgggggggggttccacaagggacngngccttcgcattgacacccttgacaggccgggcacttctgcgtgtcttggcangactttccgaactcctggcattctgnaatcctattaggatggtggctggataa

SEQ ID NO: 395 - DNA, 234 bp, homo sapiens
atgcagaagacacagaagaggactatgaggctgtaggagaagactgggtcactatatggaaggatcccacgtctctgaatgaccacatggaaagccgcctgctgaagaaacaaatgggctctatgtaattatctactctgtgaaattattgatattttggaatttgtatacagtagctggaattacttaccctaacaaataaaagtaccttttcaaatgtttaagaaaaaaaaa

SEQ ID NO: 396 - DNA, 348 bp, homo sapiens
gcctcctgtggagccggccgtggaaacgccctgacatggagtcaggagcccgagcccgtgtttcagacttggcgttcattgaccagaagagctgcttcaccacttaaccatgcagcttcaagggctccatctgcaaaacgcaggcttgaaccacaggactggttatgctccttcttgttctgtgtcctctaaatccaccccgtgggatggttctcatcctcatttctaggaaaacaaggcccaggtggaatctcttttctcatctgcaggactgatgcctttcttggcctaaatttcaacaacatgtgactataaaacttacctgtgtgtgaaccctaaaaaaaaaaa

SEQ ID NO: 397 - DNA, 285 bp, homo sapiens
  misc_feature (1)...(285): n = A,T,C or G
gtatgtttaacatctcccaggggaggcaagagcatggagactaaccatttaatggaaaatacaaacaaaaacctgcatctgttaaaagaagaagatctgagatacccagaccttaaggaagacagcacctgctgttctgcttgaggactgaactgcattgtgggaagccgcagcttgnaagaagacaggccgttattccctcctacaggcgctcctgtgatgccatatatagaaatgctgatanngaagttcatctggtttccagccttggacagctctatgatg

SEQ ID NO: 398 - DNA, 284 bp, homo sapiens
  misc_feature (1)...(284): n = A,T,C or G
atggaccaactggacatggactgatggatccaggggtcaacagctgacccaaccagggtatagcagaaagtcttcaaagatggccaccatcgattcctttgctccttctatgtatatgttacttctcatatcaaaaggtcctaaaggatgccacaaaagacccgtcatttaaacagggtgatgaaagaaagaagggattnagaaagatgggggtcttcttttcaagaagaagggcaagggaaatcttgcccgaagaaccacacttgggcccatgggggaggctt

SEQ ID NO: 399 - DNA, 206 bp, homo sapiens
gtgtcaagttgcggagctgggtattgtacatgtcctcgcatttggccctcctgaaaatccgagagaggagatgatgtgtccaaggtcactctgagaactgaacagagggccgccttctgggacccaagactccaggttccagcccactgcccagctgcctcaccctgtcatgagcacaataaaggagtttcgtgattaaaaaaaag

SEQ ID NO: 400 - DNA, 122 bp, homo sapiens
gtgcaggtgacaagctcttcaaatgtttgaaagtaactacgtctcccagtatctccaacgatctccttaaccaatcctcataaaaataaagttttgatcgccttaccattcaaaaaaaaaaa

SEQ ID NO: 401 - DNA, 290 bp, homo sapiens
cactgactcttgactagattccaagacgtgaaggacctgttaaaagaaaacaactactgctgaagatgaaaacccaagtcctcacaaattaaaggtgcctgggaatgccagaagaggatattggatcaccctggacatggagtaacaggcatgtcttctgtttatccaacacaattggtgccgacaaccaaaatccagtcctctacaagaacagcgaatgctctgaacatgagtcagcttgccaggtcccaatgtttctttttcaaatacacatattaaatccaaagctg

SEQ ID NO: 402 - DNA, 351 bp, homo sapiens
aaacttctcatggcacagaacctgccagcagaaagatgaagacacctgtccctatctgcatgtagagtcataagcagtgattttctaacttggcagtgctccttcgagttgacatttccaaaatcacctagaggaccaggaaattcagtcaggctggcagcacaagaggtgggcctgatcaaatccctcctggaaaattattattcaagaaataagagaaaatggaagacgctgggcacatgtcccaaaatactatagataagtttttggaagtaactactgatttccaaatatagaaagttttcgagctttgatttatttcgacctagaagaaaatttaaaaaataaaaa

SEQ ID NO: 403 - DNA, 236 bp, homo sapiens
  misc_feature (1)...(236): n = A,T,C or G
ctcgtcgtgcatgtgggcatggacaccgccgccaaggcgatcattctggaacagtctggcaagaaccaaggctaccgggacgccgacatccgcagcttctggcccgagggcggcgtgtgcctacctggcagcccagacgtgctggagtcaggggtctgcatgaaggcagtctgcaagcgccgtaactgtggagggtgcancgtgatcttttncccgagatgcaggcaaaaaccctg

SEQ ID NO: 404 - DNA, 555 bp, homo sapiens
  misc_feature (1)...(555): n = A,T,C or G
cttagagagttacaagnaaaccntggagcgaatccaattgnggggnggagaaattttcaagnaggggtccnatggccccctccccttgggggaaacccnttctttttttttatttaatttgggggncctttttgggntgggggtggtancaaaaagggaaggttantttcctggaaaangnnattaantccttggccaaaaaaaaaggccaaaaaaangccgaaancccttggcttattctttggggttttcccaaaaaaccaatttaattttcttattccggaattttgggggaaaaaattttttggggaaggggggaaaatttaccanaattaaggttttgggggccaattggggcctttttaaaacttggggccaattggggccttggggggggnaagccaaagtttttnaatttcccctnggggaaggggggccccccccaatncttgggaatngggtttaattaatnggaaccttaatttaaaaaaccaaaaggggtnccaaccttggggnaaaattccaaaacccttncccttggggggcctttgggcc

SEQ ID NO: 405 - DNA, 511 bp, homo sapiens
  misc_feature (1)...(511): n = A,T,C or G
ccctgcaccctatggagaggcagacatggcaatgaactgagcctcctgccaacacccagcaaggaactgaagcctcctgccaagagccatgtctcagtgttctcatcagtaaaaagggataacacgcctcacttcaaggatggttgtgaggagtgaagacagagcctggcacacgctgtccaaacaactagtggccaccagggcacccgcagtctcctcccttgtgtccctgaagctcatcaagagttgctcaacagcccgcagaaccacgtgcctgtctcattgtccttatcttccattttaaagggaggcatctncatttgcttgctggagggcttcagtggaggggatgtgattaaggcacaagantttgcttcttgaaagnactttcaaaatagaanctggtgccttgaaatggaggaaaacctggatntttggccttacagactactggnggccaaattcccaangaatacttaaaggangntntttattttattaagactgaggg

SEQ ID NO: 406 - DNA, 303 bp, homo sapiens
gaaggcagggatttcaacctgggcaacaagtccacagaacatgagatttctgaaggtgtgtgggatacatcatggttacataaaaatcctttcactatagttcctgcttccctatcttcaaaatgattccctgaagacttccgccatgacggtctaaagcctaacctctgaactgtggatggaaaattgaactccttgatgtgatctctgcacatcatgcaaccctaaacctaaatatattctctgtgtgggagccccattatttttagtctaatacattttaagtcatcttaaaaaaaaaaa

SEQ ID NO: 407 - DNA, 402 bp, homo sapiens
  misc_feature (1)...(402): n = A,T,C or G
tttaaaagttccagaaaacttggaagggggccaaggttcccccaagccaagggaaccccaatgggggaagttggttccctttcgntggccccaagccaatngntcttcccaaaggggaagggnaaaaacccccccaaaagnttttcttgccaagcccaagtgggccggggaagaaaggaaggggctttgcccttcccttgccaagcccccccccattaagccaagnaatttcttggaaggaaaccaaaatttaaactttcccacccaaaattggggccggttccggggcccttcggggaagnggggttggaaaaaattggggaaanttggttgggggccaaangggaaagcctttgaaanngggaaagggaaaagggggggggggcccccggttggcctttt

SEQ ID NO: 408 - DNA, 502 bp, homo sapiens
  misc_feature (1)...(502): n = A,T,C or G
ggggtttggccccccggggcnggaaancngaaactttggccccccggcctttggggttggttggggggggcccccnaagttggccttccccccaacttgggctttttcccaaccaaattngccaattttnggcaatttccctttcaaaaagntnggggcnncgggcnacccggccaaccaaagncnaagggggtgggccaaggccaaaggccaaaccttggccccccccaattggtttggcccccggccccaagggggaaaattggggggaaaaaaggttttccaaaagggggaaaggtttggaaaagggggcccccccggaaacccctttgggggcctttcttttcggccttggggggaannggggggggcccaatttccctttgggaanaaaaaactttcccctttttcccctttcaaattggcctttggggcccggccccccnaaattgggggcctttgggcttttggggggggggaaacaaaaaggcgggcccccccc

SEQ ID NO: 409 - DNA, 406 bp, homo sapiens
gtggggtctttcagttggaatgaaagactcctggcggggccttggagaagaggagtcaccactgtgcgtagatggcaggagactcattacagatctcagtggagtagcagcggacttgaagagtggaggcctgagcgtgggaaccttcagttaccccagcctttgggaccctgggggccttggaacctggtctgtttcctgcgagtcctgcgttctgcttctgccccgactccaatctgaggggtctgtgggtatgggctgtgcagtgagcctggtgcgccccaccttgcaagttgtgcgtggggccagttagcctgcctgtgctttgacctgctttaaaaatgttctaattagttgtcaacactcaaaaattaaaaatcccgagatttaatcatcaaaaaaaaaa

SEQ ID NO: 410 - DNA, 209 bp, homo sapiens
  misc_feature (1)...(209): n = A,T,C or G
gcccttgaccttggtgtcttctttcctggaatganacanagntnttgtgcaccntagaaatgntctttgttggaaatcctgcttagnccgggatntaacatgggccgaaagacatggaagaacncncaatcntnttttacnnaatggggaagggggtttgangcttnncccnggtttttttgcggccgcccttggccaaaaaaccggtt

SEQ ID NO: 411 - DNA, 351 bp, homo sapiens
  misc_feature (1)...(351): n = A,T,C or G
ctgggggggggaagccttaacccctggccattttaaaaagttccaagnaaaaccttggaagntggccttggtncccccccggggccaataaagggttccccaatncttncttggncgaaggaaaaagcccccatttttncaaggggagattaccccttgggnaggggccttcnaaaccggggctaagcaaaaggcctttcnacccaccaaaaaaaggccggaaaaattggggggccaccaccccaccaaggggggagggaaaaaaaccttggggtttggtccccttgggggnntggtttttgggaaaaaaanggattnggngtccggttnnggtccaatggggggggtggg

SEQ ID NO: 412 - DNA, 397 bp, homo sapiens
  misc_feature (1)...(397): n = A,T,C or G
aaacctaggaggataccntccacaccttcancgaaaannggccaanagaccattggccacggattgcaagaaaacncccccatattaaatgggccttatntagggtgatcatacatctccagttattcttgcacattnccatatcattctaccatgcatggtgnatcccatggcccananggganatagacccccccanattgggaggtaaaaatagaaacttggttcnaaggaaaatcccaaggccaacnattcaacttggttgggcttccccttttggaanagaaaaatggccccngaaanccaaacnaatttttttcttttaacccttgcccacaacctgggatttacccttttccagggtttccattccncccaagnaagaaaccaccttggg

SEQ ID NO: 413 - DNA, 353 bp, homo sapiens
  misc_feature (1)...(353): n = A,T,C or G
caaagttccccaagccaaggggaaccccaatggggagttgcccctttccgttgcccaagccattggttcttcccaaaggggaggggaaaaacccccccaaaaggttttcttgccaagccccaaggttggccggggaagaaagnaagggcnttgcccttccctttgcnaagcccccccaattaagccaagaatttcnttggaagnaaaccaaattaaaccttcccaccaaatttggggccggttcggggccccttcggggaagggggttggaaaaaatggggaagttggttggggggccaagggaaagccntggaaaaggggaaagggaaaaaggggggggggcccccggttgg

SEQ ID NO: 414 - DNA, 300 bp, homo sapiens
  misc_feature (1)...(300): n = A,T,C or G
ccctatacaaaggaaagaatgaaaactccaactcccaccaggccagtcttgcaagagctcctgaggaaccnctaatttnggaagggnaaactggtaccagccactgcaaaaacccccccaaaattttaagatnaatgnccctttnaagaaactgcgtnaactagtgngcaaaacaaccancttngcntcacatatacacggggcacaattttcatatatacacatattttccttntaatgtgaaatggggccnaaattnccccagnggaaaaaanacccaaactggccaaatttgggata

SEQ ID NO: 415 - DNA, 209 bp, homo sapiens
  misc_feature (1)...(209): n = A,T,C or G
aaccccttgggggggnaagcttaccttggccantttaaagntccaagaaaacctggaagnaaaantgcccaattngggtccancctggnggagaaggactccngttttgtggaccttantggggccccanccaaggcaaaggccaacgngnaaaccttgggaagggtgngggcccccacnnatgncctttaagcccgacccattgggcc

SEQ ID NO: 416 - DNA, 175 bp, homo sapiens
  misc_feature (1)...(175): n = A,T,C or G
agcacccccttggggggggagactacccttggcattttaaagnttcangcaaacttgggagnggggaaaaaggccattggccttgttccnttggntggggttggaggccttngcnnggggggccttttttnggggccccaaactnctttnnnccttgggggcactttgaacgcgg

SEQ ID NO: 417 - DNA, 101 bp, homo sapiens
  misc_feature (1)...(101): n = A,T,C or G
tacttcctttattttttnggtncaagccttggcctttggtggtttttggaattntaaaaaaaactttttcaaaataaaaagggaattcccttgttgggaat

SEQ ID NO: 418 - DNA, 337 bp, homo sapiens
  misc_feature (1)...(337): n = A,T,C or G
actacacacgccatctcacctaggtatgggacccnagtaaaacgtgggacgaaactcctcgaattaattttggntgggagaaannnccggggcgcgtcaaaatntgtttatantttgnacctcgtggnnattcccgcaanaggnccgcatttncggctcngaaccaaccaattagcatnngcataaacctctntangagacacttaggagancaaagcgttttttgaaaatgggtattagggtcanancgtntngcaacgcctnttcacaaagtaaggattnaattgngggaaaaatttgtttgggttncncccccaatnggttacattgggaatat

SEQ ID NO: 419 - DNA, 410 bp, homo sapiens
gagggaaactgcagctggcaggtctggagaatcgctcaactacattcacagctttacttggagtcaagcaatggcaagaaaagtcttcatcttcactaggcactggacaacacggagaaatgctgactttgaggtgtttaaatttcatcctttgaggatcagttcaattaacttctcctaaaggaaaccaacccccacaaacaaaagatttacacccactgaaactgagaaacacttatcagaatctgtcatttcatagaatattgacttgtgacaggtcttacgacactgtctagttctatagcactgtgcttatttcttttccatccaacctttgtactccccactttgtatcttcttcagtggcttctaggaagtattactataactactgaatcaatgaattcacc

SEQ ID NO: 420 - DNA, 660 bp, homo sapiens
  misc_feature (1)...(660): n = A,T,C or G
tcattcttttaccattggggggaccgnaaaaaggtggtttcccttttacttttgtattcaccctcgcnatgtttataccctcgngaaattggaagggggtggagggnacaggtgggccccccgcagctatgacctcgccccaaacagtaagccaagaggtagcattaccactctnaaataaggtggccattgnggacctnggaaacctccgcccattgtaagngccaaaaaccattttggacccaaattatggggaagcaagnaaanattggaagtaccgggngcaaggggaaaagaggttanaatagggnaaggccaaaattcccattcttctccttttttccccccctcccaaggtggggnacctaattttcccaaaccaattggtncttttttttcttggttaattggttaccaaggccctnggttctttggggttaattttggtacccttggtncttggaaggtnggggaccaattcaattaattttctttttcaaccaaggtttttcaattggaagnggccggggttggggcccccaagnctttttggggtnaaaaccaatttggccccaaggtttttcccaattttttggcnttttttccccaattccccttttccttttttncttccttttggtgttttccccccccttggtt

SEQ ID NO: 421 - DNA, 244 bp, homo sapiens
  misc_feature (1)...(244): n = A,T,C or G
ggggggggagctacctggcatgtaaagntcaacaactggnanggttattccctggctggataccccccccactttatggggaatggaatgggccccttttnccccactggganttaagaaatggnccctttttggtggtaatcaatnggaccctggaaacaaaccccaaggttttngaagcccggtggtggggtggcactttcntacggtgggaatntttcnttccttccttctggtccacccg

SEQ ID NO: 422 - DNA, 442 bp, homo sapiens
  misc_feature (1)...(442): n = A,T,C or G
ggcctgcagctgcatctgcttaaatgctgaacatttcaggaaactcccttctgaccatggcagcttaattcactggtagccacgtcaagatttgaggcacttttctcctgttgggcagtctccgcccttcctgcacctttttgcagctggccacgccccacagaactcagagcacacctatgccttgcactgntctgggacatcctcgagtgtcggtgggcagatcaatcgtcttaccgtggctgcttctcctcagccggagagagaccactgaggcgcanaggaatgagaggagtccagctatggcctaggcaagtcccctggcctcatggacctcaacccattggctaacagagaaaaagtgctgcctgcatacctcatgtgatacgactggaagagataatggncataaaaacatatagtctttttaaaaagtaaaaaa

SEQ ID NO: 423 - DNA, 274 bp, homo sapiens
cgacaaaggatctcctgtgagtcagaatttggtcaagaatttcagtgcatcttgatgctgattgagaataccacctgaaactgatctgaagtaataacaggctaccaacgtaatcatctctgtgttggtccatgcttgaatgaatgtacacggaatcttgggtaaacgagacaggatttggtttttcacttgtgtctaaaaataaataatagtgtattgttgcctctggcccaatgtacaaattttataaaatatactgcggcaaaaaaaaaaa

SEQ ID NO: 424 - DNA, 164 bp, homo sapiens
  misc_feature (1)...(164): n = A,T,C or G
gactggtactgtcctcntcgcctcacngacnttctgcacgccctgactgnantggatgaacttntacaccccaanattngagccttnccngatgagccagcactgtatacctacacatgttaattccagctcgaagtangctcnggtgatgacaaggagattcc

SEQ ID NO: 425 - DNA, 297 bp, homo sapiens
gtactgaatacacaaggatgggcctccagtagccagctctgtttctctcatcaccccacctgaccagggccaggccaatcagattattttcctccaaaaatgtgaaatatggaagacaccaagactggaactcagtcctttgctagaacctgaagaacaagtctaacaacttctgctgctgaggtccctgggctccatcctcataccctttggcttggtagtgtagctcaacccttgtttctaagtgttatttcaatatccttctaataaatatttctttccccccaaaaaaaaaaa

SEQ ID NO: 426 - DNA, 268 bp, homo sapiens
  misc_feature (1)...(268): n = A,T,C or G
cttcaaactgtagtcattatantgaacangttatnacacctcctgngctctaanntctccatgcccacccagtatatatatacctggcacattaattcaaagggcaanttcgagggagcctctcttgttcttccctgcatcatctgatacctatgcncagacgataatgcatatattaggcttttatgaaatcccgtgctcccanccttgctctgancaagctggctatttgtatatgctgangctgagctttgatcacagcaacggc

SEQ ID NO: 427 - DNA, 475 bp, homo sapiens
gtatttgaggtccagaagatgatgggcaagatgaaaaacctgatcactgcagaaaaaaagaatcagaagtacagccaggaccagatgctgaagaagatcaatttgatgtggattcatagactctatgggataaatcaggcaacaaagccagtgggaattaagaagcaggcagaagcagagccaggaggtacacagctgatttagcatctttatagctatgagttttcttttaagctcattcccctctaagatacatctattggttttgaagttactgctccctgagaccaatctcaatggcgttcttgaacttgaaatcaaaaggatctgcatcctccttccagctctgacaagtattagctgcataaacctagacaaaatatttatattatttgaattataatgggcaacataatatctcactcagaaatattatgaagattaaataaaatattgagtgtcagctaaaaaaaaa

SEQ ID NO: 428 - DNA, 316 bp, homo sapiens
  misc_feature (1)...(316): n = A,T,C or G
cacaaaagacccgtcatttaaacagggtgatgaagangganggatttanaagatggggtctctctcaagagaggcaaggaatctggccgaagaccacactggcccatggggagcatcaggctccgaacccccgagtttggaggcaccaaaaaggaaagtggggaatgaatgaggcacaaaaaaactcatttttcccactttatactttttccttggctgggcctaaatacaaattgcaaaaagtctatcctaatgagagcttttaagacctttgcggatgcttattaaatggcaaataaatagagtaaaaaaaaaa

SEQ ID NO: 429 - DNA, 176 bp, homo sapiens
  misc_feature (1)...(176): n = A,T,C or G
gagagttgtgtcctganccactctaactgataagaagatannnntcccntgnaccccacttgaanaaggtacttgtgaaatgttcttcccactcttgagaatgnaattatgtacgccgctnccaaacctataaaaaactgcatgatngggccaccaccctttgccgactccctttt

SEQ ID NO: 430 - DNA, 143 bp, homo sapiens
  misc_feature (1)...(143): n = A,T,C or G
gattctttacctgccccctctganttgtgatgatatacatgggccctctacccatngtanaanagccctttacacnaancttgcngctcttnccacagncatcaagcacccctancccaaacctataaaaactaaatggtcat

SEQ ID NO: 431 - DNA, 332 bp, homo sapiens
  misc_feature (1)...(332): n = A,T,C or G
caaacaagcccaaggcatgttaagcagtgataatanctnannatctactgaccacttaatattgtnccnagtactctnttttgatcaatgaacanccatacaccaaatnttnattgttacacaataggatctnacctaacnnttnnangactttnnttgnggaaacccaccaaaaccacanaattttttactgantactctcanntacaagnttattagccgtnaaacccctgcaagcancaaatananacncctnattgaattttgtcttataaatntatccactacacaaataacacnattgcccccctntcttatacactgtcgattcc

SEQ ID NO: 432 - DNA, 348 bp, homo sapiens
  misc_feature (1)...(348): n = A,T,C or G
tttattatttgaaatctaaagagtgtaatgcaaagnaatatgcaagcaccacnanggcacttgngnagnacacnanaaggagcatctgtaagtagagcttaggaatagnacttcccacaccatgttcccaaaacaagtctcanaaaggttaccattgtgccaagccaccaagtcagagngcaagctattgtntatgtaaangnaaaccanaccaaagcaaataagcttgtggggtccttgcccacnagtaaaagcaccggnaaagccctcnaccatttaaaactnggaagttccaagccttgggncattcttttggaatctttngnggaccttttcaaaaatccttcc

SEQ ID NO: 433 - DNA, 315 bp, homo sapiens
tctaactgaggcacaaagcactgcgcagaatctgcaccaatcgttgccaccgactggcagcagaatggtagaaggtgggagagtcccggaatccttccaggctgacttgagaaacgaggactgcacacgttcgtctcccgaaccgaaggggtgaaaaggctgggtgccagtttgctactcggctgcaatgatctcatgctcactgctctgtcgtcctgtccgaccagttcaaatgcctgttcattataaaccaaatacatacatacataaataacccaaactacttgaattcttcagtaaccaaaagaagaaaaa

SEQ ID NO: 434 - DNA, 350 bp, homo sapiens
  misc_feature (1)...(350): n = A,T,C or G
tgggggagctaccttgcatttaaagtcaagaacttgganggggngggggntnagggtccccaaagnttgaccaggtttaggggatctttccatttccattccccaccaccattggacttgggttcaagggaaccagggggaaatngaanatttccnatcccttggaacccaccaatttggcaacttncttggggnaaaaggaataaanattnctctcttnccccgcncaaccncaatttggtanaaaaaaacctcaaatttngggggggcttgtncancggggcccacctatttgttggtaaaaaaaagcgccnctccttgaantggacacccaacaacagggaaggggg

SEQ ID NO: 435 - DNA, 160 bp, homo sapiens
  misc_feature (1)...(160): n = A,T,C or G
gggggggaggccttacccttggccttttaaggttcaaggaaacttggaagggggtctggggggaaccaagnnncccactaattcnccccccggtttgggnaccggccaagcnaaaataacctttttcttctagggaatgaaaacaaatggcattggggcg

SEQ ID NO: 436 - DNA, 210 bp, homo sapiens
  misc_feature (1)...(210): n = A,T,C or G
aaagtcaaggaacttggagngcctaaggaaangactnaccacaggcctggncntnctgngtttgcctttcattagggaatggactctgatgcngtgncccncctttcaccaanaagggggacanggcttggtagggtatacntttttccaactccatggnggtttggggacttacaaanaaccctngngggccaaaacccatcaacacac

SEQ ID NO: 437 - DNA, 346 bp, homo sapiens
  misc_feature (1)...(346): n = A,T,C or G
aaggtgcactaaacttggagcactatcnagggcntnccnttttttgtaanggntcaccgcctaaaggagggtgcaacttcnctcgnnctttntcctaggatacaancactgccttgaanactcacctaactagatggcgtcggccatatantactatagaattggtgcatagttntagggaacatcgttcaaaanaaatgaaggccnatcatgtgtttccagggcaatgtggagngcctcacccaggaccgcccacgccctngcttgactccttggatctttgagactttcaagcctccagngtacaagaaaaatagagatttcttatttgttttaaaagccaaaa

SEQ ID NO: 438 - DNA, 522 bp, homo sapiens
  misc_feature (1)...(522): n = A,T,C or G
accaatccccggagatcaattgattacttcttctgctctctcactgggaaatgagcgggaattccaccaagcaactgtgcaacatcaggcccaagggaatgaaggaaacaacgaccagcggaaggggagaagcaactcactgtgtgtaaattacagactatgatgcatgcacgtgcatatgcgtcacacatacatgcacacaccagcacacgctgcattgacttgtctgcctgggccgtcaaaggccccctggggttaggaggacaagagggaaccatgggcagggtactcagtgaactgacccagccaagcaagaggggatttcagtgtccacagaccaaaccactcagaaaaccatggtcagattagcccaaggtttagaaccagaggaagaaaagttctgctgattagaaaacaccctgggaggaaatagcgacaaaacaganggttattattataattaacccacaacttccctggacagagcatagagtggggggaaggacctaaagaaagcagaaa

SEQ ID NO: 439 - DNA, 213 bp, homo sapiens
  misc_feature (1)...(213): n = A,T,C or G
tgcaagaaaacttggggcaccttaatggggaananaggcctattntttggaaggggnttncnagcccaagggaaggggccaanccccaactttacattttccttgggnaaaagaacaggcccccttggaaaacccaaaccaccttggatgggccacccttaagaatcttnaactttcttggccatcttgggaacttgtgggaaaaaaaaataa

SEQ ID NO: 440 - DNA, 133 bp, homo sapiens
  misc_feature (1)...(133): n = A,T,C or G
gtggtaagatagcagntctacaagctgagaaaccatccctagantcttcngttcaaccngggtaaacagnnnaaggacctnntttaannaaaccaaccaacaaattaattaaattaaagggcaaaaaaaaaaa

SEQ ID NO: 441 - DNA, 118 bp, homo sapiens
  misc_feature (1)...(118): n = A,T,C or G
acttcggcgctttgaaaggacggtgttnttgaaagaancatgctnttcccagntggngatgcctcgcctttaaagncttngattttcctggcactctttcctaattacctacattttt

SEQ ID NO: 442 - DNA, 188 bp, homo sapiens
atgaataagacttcagagaattatgaagttgaaaccacaacgtggaagacacctggggttgacaaacgagtcattggagacgcgcttcctaggagagctgtgtgaccaggaacacctagagtagtgtatttgctttgttaaagagtgacttgtatgagagagaaatctattttccataaaaataaaaa

SEQ ID NO: 443 - DNA, 179 bp, homo sapiens
gtctttcatctgaatcaagcaagaagatatacgcctttttacagaatactctgcacagagaaaatcccaacccttccttcaaataccatctttcaaaacatttctgagaatgtcatctcttttccttaggcaatgggagtgcactaaaatacactcttgatttgtccaaataaaaaaaa

SEQ ID NO: 444 - DNA, 541 bp, homo sapiens
  misc_feature (1)...(541): n = A,T,C or G
tctgaaggttatcttctctggccaagaagtggttgtgaactgattaccaagatggaaaatctactgcaaaccctcaagatataagcacccagggccgctggctttcacactttttcctcagaaagatcattctgaacacatgtggacactgccacagtttgccattacaaatgtaaaaaaatgtttagagagagctaagtatatggtgagtcctgagttgaaaattacagtgtggcaagctgttaattagagcttgagtctctccacaatgcctgctgctcagagggactcatttggggcagcacgctgagctttgcatcatggccagcactacaccacacctcggctccagcttttcttaatgcgtcctgctgatgatgcagcaaggagaagccacccagaaacaatgacagaatcacattataaaaactggaactcccttcaaaagcagcaccctgccctttgtaaagattctacttacaaantttacataatggatggtcaaaaagangcatatggnaagatgatgaacgcttcaact

SEQ ID NO: 445 - DNA, 127 bp, homo sapiens
  misc_feature (1)...(127): n = A,T,C or G
agccgctccggctatncccnctggtgagctncctcgctttaactcccaactntaggganncncctgcttgagccangggngggaancccctatttctcncattgacgcgcacaaaacttttctaatg

SEQ ID NO: 446 - DNA, 193 bp, homo sapiens
  misc_feature (1)...(193): n = A,T,C or G
ctccaaacaataccctatagagaccttggaaggaagaattaganaacnacattnacagaaaagctatnggttcatgaatagnccctggnttgcctcatacctgcncatttnnagaagtgnaanacctgcacatttcaagctctgaagngnttgagtnacacctggtnaaacagaagagcagcaaaagggaaac

SEQ ID NO: 447 - DNA, 749 bp, homo sapiens
  misc_feature (1)...(749): n = A,T,C or G
ttgggggaccccggaccccacncngggnttcaaccttctggggncttataaggaaaatccacccccctntttntttgatttnaaaaggtnttggttnaaanaacaatttaaaaaaaaantttccccattttttccccatttnaaanggggcaaccaaagctttnttttanggggcnttctttggggttccaaaaaaacaaaggggncccntttcttctttttttggttcctngggnnagcccaccccaagaaaaaaccacccnggttaantttggggggaaacccccattcaaggggaaaattggggaaaagggcttcccttttggaagggcccttggggaagaaattggggaaattgtttgggggcccccaaagtccttgaaaaagggaaaccaagtggggggggcttgtaaatctttcacaaatcttgggaatcccaagcccaagaaaagaagccacttgaagaagctcaagttgtttgggaagggacaaaaaaaagggggccaaattgggatataccaagtaaaccttaanttgaaatcaaggggccccgggatccagggaaagatgccttggacattttgtttatcaagcaggaagaaaacaagaaagtaaaagggagggggggaaaccttcttcctaaagtggntacttgggggntaatgaaaaagtggtcctttcaaggggaagaagggcggacattggaaaccaaggggcaagcnttggataaaccggtttggattaccttg

SEQ ID NO: 448 - DNA, 177 bp, homo sapiens
  misc_feature (1)...(177): n = A,T,C or G
aaggtgttaactataaagaatgctcatgtnntgacccanntanctgtcaagccangaggctcattgggcaccctgttctcagctgtcanacccattnctaattacatccgtaatccataganagncntaacaagtattaggnttcaatcttacctctnagnacccattggccttgga

SEQ ID NO: 449 - DNA, 218 bp, homo sapiens
  misc_feature (1)...(218): n = A,T,C or G
agatcaggatcctaagggagttaacagaagacatggagagtttttaaaatgtcaatgcctaggggatctttactgacggcaagaaagaagaaagaaacattgaaatcctagagcctggtcttggtttagtgacccccctggccttaccctttgtcccttggccatcncactgctcaatttgaccagttcaaacaacagaggaatgaaaaagaaataaa

SEQ ID NO: 450 - DNA, 576 bp, homo sapiens
  misc_feature (1)...(576): n = A,T,C or G
ggtaaataacaaccatggcgggtaaacccctttgttcaccgctncttatttacccacacccttttcttcgggnacccgggacttccattgtgnggtcnatcttcaatttnaatccctcaattnacnaaccctttatnaagggccgangttccttacttacngggtccacccaattnttggcnagaatgnaaagccccttggaagggcaaaaagaaccggggnccttgacnatannggctttggaaatcttcccangcntccnnntaantntaatcaagccnttntgcnannancatnaaccaaanggctanaaatgttgttncaaccagtnggnctttctttngtggtaaaccccaagggaaaacctngngggaagctttgccccncaattttttgcacccaatnggcccntannaccaaatttttattgggnacccnttnttaccgggaaacaacccgngtatcnggnttattggtngccttattaaaaanactttttgcgccattttcaaaccaancccacaaaactttttttgnccattttcaaaaaaaccaccccttttttttaaaaaaaca

SEQ ID NO: 451 - DNA, 127 bp, homo sapiens
  misc_feature (1)...(127): n = A,T,C or G
cccccattctcgttgngcttcttaacagtnttttttattgccctncccccgacttcaaaaagtgttaanagttcccatggggatggtgaaatgggccattcctgaatggtataataaatctcaccgg

SEQ ID NO: 452 - DNA, 136 bp, homo sapiens
  misc_feature (1)...(136): n = A,T,C or G
ttcactgcaacctctgccgcctttgggacaaagccattcttcttgnctcagcactcccgaatangacnaaagattccccactttgtggcccaanactggggtgcaaatggcgcaatctttggctcacttgtcacct

SEQ ID NO: 453 - DNA, 176 bp, homo sapiens
gatctgctaccctaaaatctaagaagcatcagaagaaggactttgtctgctttgtttgctgccctatccccagtaactagaagagtgcctggtatatagcagaccttcaatatgtatatcaaatgagtaagtgggtgtcctgagcaataaaaattgagtaattatgaaaaaaaaaa

SEQ ID NO: 454 - DNA, 230 bp, homo sapiens
  misc_feature (1)...(230): n = A,T,C or G
aagccatgagctaagctgatgccattcagctgggtagcatcgcagtcactgtgcaacttttaaacctacagctgcccaggcccactgcagacctgctaaattcgagctccttgtagtggggccaggccctgggacttncacaaaactctgcaaggtatcactgatgagaaaaccanactcgatgagagtctccttgagctcgggggaagaacttgcataaccggccactt

SEQ ID NO: 455 - DNA, 167 bp, homo sapiens
gcttccagatctagtgtccaagtctatgagtagctttattaacagagagaatggccaagagaagcaagcacactacagcaataaaaagtgacagttgacggcctagcagcaaaggaggaaacagaaaaactataaataggagtacaataattccaaagaagaaaaaa

SEQ ID NO: 456 - DNA, 586 bp, homo sapiens
  misc_feature (1)...(586): n = A,T,C or G
gactcctgcttaagtccaactgagccgctgagacaagtgatgtcacctgccaatactgnagattgaataaccagggaaggctgaggaatgcaagtgaatgtaaaaaccacctggagggaancattgcancaagaaaggaacagcaagtgcagaggcctgaggcagaaccagcagggaaaatgctttgaggtgaggcaggttccatgaaaacctggaagaaatattcctgaggaccatccaacaccatttccctgagagacaagctgtaagtgctgttctagttacagatccgagtccctggtacattgatatcaagtaagggtgcatgcagctcaaaaggcagtttccattacactggacaagagtgtggctgcctgagtcctaaaactgcagtggcttctgctgacaatgtgaggagtagctgccctgtccagagtgtggcccgcacgctgccccttccctggagggactgaananaacagcttggagcatgccctttcctttccttatctcgcccactatgctaatgctgctcatccctcaagatcccgaggtattcctcctcaattcaatacaaccaatcaac

SEQ ID NO: 457 - DNA, 218 bp, homo sapiens
acaacacaccatgtgccaagaacagaagaatcccacacagccactgcccaagtgaagctcacagtcaggagagcagacaggagaagtggcggttctctcagcaccctgattaaaccttcagagccatggtggataacatccagctgggtcctgacaggtgtcaggttgctgccagtcctttgtagaaaataaactcttcaaatttgtaaaaaaaaaaa

SEQ ID NO: 458 - DNA, 364 bp, homo sapiens
gtttctttttgccctgtgggcagcagttggaagatcctgagctctcggctgtgttctcattccacctcgaagaggatgcaggacccagggcagcttgcggcaaagctgcagggtggcacggtgttgggccatccttccggatgcccaatcttaggattgcagtcactgtggcatagctgggagccatggatgggtgataattccatggataattccaggatgatggactagcagacatctcatgataggaaagataagaccactgggatacataagtcatatgttttacaggtttattgagaagtttatctgcctgacaagatgggttgatttgtgcatcttaggtcaggataggatgcgtttt

SEQ ID NO: 459 - DNA, 373 bp, homo sapiens
caaagccaagaacccttatgggccaaactgcactttggggcccgcctgttccgcatcaaaaagaaatattgaaaattataccaggcaacaggtataaaccaggacttctcctgaaacctgattcaccccctgaaaatggaaaagcatctcaccctgaaataaaaggatcctcacctaccacctgagcaaatggggctctacaattacgaagtactgtggatgggtggacatgtctgctatgccacgaaaggcagctagacagaaactgacaatcattttctatacttgatcttctgatagacaattgtcctcgttttttctcaaaatttagcttcctcaatttcggcttaattcctactctccttaaaataaa

SEQ ID NO: 460 - DNA, 155 bp, homo sapiens
tgaccttgggaatgaaagctagggataatggagcaaaaacattgaagcctggattcctgaaggtaccggacagctgccatgccacccctggacggcctgcttcccaaatttcttttatttaagacagaaataaactttaatcttatcaaaaaaaa

SEQ ID NO: 461 - DNA, 181 bp, homo sapiens
gtggggtctttcactggagcgcggctgtctacgtggaaatggccatgaaggcaaaggacacatggaactgtggagagccagcgtgatggaaagactgaaacatctcactagtaatttgacactgatcccatgttgaaatcatcacgtgaaatacaatgttattgcaatgagaaaaaaaaaa

SEQ ID NO: 462 - DNA, 525 bp, homo sapiens
  misc_feature (1)...(525): n = A,T,C or G
ggggtcaaattaaccccgccttntggtttttntatcctncccctnnataaaacccgggnggattgtttttcccananaattgttnggnaaangaaggcctnccttggattcccaatttttttactcaggaaaattggaaggaactntttnaangcccttttttaaaaaattttccttaaaacaaatttggggnccaaaanttggaccaagttttggccttgggannccattncncaaaagagtntnattttnttttggnngggangntttttattgggggccttggaaaatttggggggtcccccttcccaaaaaaaattttngttaattggtttggaaaaccttctttaagcccccaccaagntnncccctcnaaaaattggtggaaccttngccattttttggggaggggtnaaggggtccnttttttggaggggganggggntaaatttcnaaaaaaggnttaaaaaattggngggggcccccttttangaaggaanggggggcccccttattccccaaaaa

SEQ ID NO: 463 - DNA, 370 bp, homo sapiens
gtgagagttgggttttccagagcccagtcacaagaaatttacctattgatcctctgacgaaatgcaatggtaagctgtgctaagtaaactgacccagctcaccctaacttgtaactgcactgcaatgcttgaaacgcagcgaaaatcctacagcatgttcccttgttctctgaactcacctgcccattgcgtgcaagaaaaagctggattccttctcggtctagtaaatgattttcttgaatgatgcaaccggcttatctagtgggttatctctggacctgttcacaagctgacaagtatttgcagggatgtacagtcatgctttctgttcctcaaactgtaatgtgtttgtaagtgaaaaatgatgagt

SEQ ID NO: 464 - DNA, 296 bp, homo sapiens
aattgaaaattaagaatgccatgtaaagcaaggtgaaaaaggcaggggtgtacacatcaatcccagatccagggagccaacatctttaagtagacttcttcagatggcctgtggggtaccacagagcttacagaacaacttaagatcactccaaaccagagtcaaagacatccctgccacgcagcacatagatttataactctggtcaaaggtttcgacaaatacagatttcttcaatccgaagtccatctgtgtgtgttcccagaaataaagaacagtgcatgtctaaaaaaaaa

SEQ ID NO: 465 - DNA, 376 bp, homo sapiens
agcacctaccacagtacctggcacacagctgtttgatcaaagcttgctacactgaactaaactgcagtccagatcctttggataatttatgcaagatcacaaagctaagaggtggcagagttgggaaaggagaaaaggcaaaccaattcgtggactgagcctagaacagcactgcttccctcatgagtaggatggcaccgcctaaaggcatccaacatcaatcaccacctccacagaaatgcatgctccttttatggaaacgcagcattcagagttttacaacatttgtaccatggaaggaaagaccagtgctgatttggtgccaaactcaaccgtaaatacaaggtgttttcttcattggtaattacagatgaag

SEQ ID NO: 466 - DNA, 179 bp, homo sapiens
  misc_feature (1)...(179): n = A,T,C or G
tttttttcgggaggccagagctttncnagacncntgggatcttaaaagntcntccatagnncctnggatattttggggnccacaatttgctttttctggagtnttntctatcacccnccttggggganaggtanaaaatgaaccttctaattaaaagagcgcaacacccttccttgggt

SEQ ID NO: 467 - DNA, 287 bp, homo sapiens
atacccacatacctccaccccagtacctggcagagtgcactcagtgaactttcttgaggattgttaactaacttcaaggttgaccatttttacttaatctgagagtaactgacattttctgtggtatcctttttcatatttgagcacaagtgatttaggacttggaacggagagctagtaggtggggctagaatcggcacctgcggaaaatccgaccaatgaggagcgaacgacacagcggccatcttggtaaaggaaaaggaacaagggagaaagggggacccaat

SEQ ID NO: 468 - DNA, 290 bp, homo sapiens
  misc_feature (1)...(290): n = A,T,C or G
atgaatcaccaatgaccgggttaaatgttgttcctggtgccatttcttgaagagttgacacggctgcctacgagggagaagaggccacacacccagcaagcaacagaaagaggtgatgctgtcacttacaagggccgctatcaaacacgagtaccaaagttctagcctagcactgcaaggagacccatgtcctaatagacgcaatgccttgccaaaaaatatcagttctgtatacttcagggtaaaactatgtttctgaggntacagaaaaatagccttttggaatctta

SEQ ID NO: 469 - DNA, 379 bp, homo sapiens
  misc_feature (1)...(379): n = A,T,C or G
caattgaatgtaatggtgtcattcattctattaagaagcctgggggaagggcagattgagagataacaagagtcctatttctacatattaaatgactaagagaaaccacctatggaatgacaataaataaacagacaactcttggctccgcccagaagcaatccatcattttgaggtcaagtagaaaaggtggaacctgaaaggaaacggagaagtggtggtgagggaagtaggagaaaaaacccccaagggggnnaaggnaaggttaatttaaggnccgggttcccaacccaaaaagggaaaaagggccccaaagggggaaggnaaattgggaaaaaaaagggccctttttttttttttccccccccaaaggggaaaa

SEQ ID NO: 470 - DNA, 251 bp, homo sapiens
caagtccagaatgaaagtgggttgttcccatggcaacagaatacaaggcagagaactccagagaaggggggcgggtgcatctctacactcaaggccatagctgcaagaaagccccaggctccaggatggtggcagcaaagagatgcaacctgccatgacatcacactgccagatggcctgctgttgacatagggttcccccccaactaattatttgcataaatctggatcattcattcaaagaaaaataaa

SEQ ID NO: 471 - DNA, 294 bp, homo sapiens
aatggagtatctgctgaggagactggaatgaggaaggaactcattaagtctgattgtctctgaacagcaaagttcctgagatagccaacttaacatacctggtgtcaggagtgattcaaggatgcagctggaaaaatgtggatttgggactagatctctcactacctgactgttaatgatgatctaatcttgtaagtgtatggctgtcttgagaaatacatgaatcatggatctctgttggatgggtattcagatgatcctccaaatcttccttttaccaaataagaaaaatgg

SEQ ID NO: 472 - DNA, 114 bp, homo sapiens
  misc_feature (1)...(114): n = A,T,C or G
cttcggttgaacccgaaggattacanctgtgcactttcactggccccnagcgatgatttgtttnttanannccaggagtctgatgaccatcctgngcaatgatgagaaaccgtg

SEQ ID NO: 473 - DNA, 182 bp, homo sapiens
  misc_feature (1)...(182): n = A,T,C or G
tcagcctggttaagtccaagctgaattggactcgcttccctttanaaaggcgcgcctctnaggnaatnntggantcctgagcgccatttaaaatggccgcttttggccaaattcttttgnttttttancctgggcacagaaaataccttaatnaatccacctctggttattttaacccccca

SEQ ID NO: 474 - DNA, 166 bp, homo sapiens
  misc_feature (1)...(166): n = A,T,C or G
gttccagagcagaagaggcagaggatttaacaatgctcctagaagaggaccaggagaacttcgtggatgtggaaagggcctacaagggagccaagaagcacccatgagcatcttttttccataagccctttgggtattaaagaggattgnaacccaaaaaaaaaaa

SEQ ID NO: 475 - DNA, 279 bp, homo sapiens
  misc_feature (1)...(279): n = A,T,C or G
ttaataactgaggaaccacccatggcccantccatgccctcatcttgcgccngtgaaaactgcangctcatccagntaaaggcaggatgaagcatgatggacatcaggancancaantcgccttacttcagagggnacaagctcgacaggtcgtaaaatttnanggcaagcaatcccaggaaggacacgctgngaactttggagcgtgcaangaattcaccnttcctttctcttgtctagcttttcangcctcctctatccctctgtaggaagcgcacg

SEQ ID NO: 476 - DNA, 314 bp, homo sapiens
  misc_feature (1)...(314): n = A,T,C or G
gcccacccaggaccatttgtactccaagaataaaaacattgaaccagattcccttggagtccactttcaggacccagaacagcccctagtggtgtggctcctgtctgtcaaggtgatgtccagaaacctcagctgctttcgctgtgatgtacaaatccccttagggccctgagtctctggccaaaatcatcgttacatattcttgccaaaccacagtaccattactgngaattgatgaatcttagaatctctggntagaaaagaatattggaggccgnttctcccaataaaaggnatgctcctaaaaaaaaaaa

SEQ ID NO: 477 - DNA, 449 bp, homo sapiens
gggcaggaagcagaacactcacattcactgataaaacaaattaagcttggacaagagaagctgcagacagaaaactccttcaggactcagatggtggtggagaaagattggaagcagctgcctcggccaaccacctggaaagtcagccagttgtgctcctatctgcaagatgtgcaaaatgctgccaggcagccgtgtggtcaagtcagtgggaaattggaaaattacaagcatagtgcacatgaaatatgtacagaaaacagaagttggataggcccgcctcagagcaatggagagtacctcggatgctcttgctacaattatcttgtacaaatgcaaagagtgaaatgagagctgtgtatattgcctgcactagcagaagaagaacttcaaaaaggtaaatgaggctagttttatatcaatgcaatgagatgcttcaaaaaaaaaaa

SEQ ID NO: 478 - DNA, 317 bp, homo sapiens
  misc_feature (1)...(317): n = A,T,C or G
ggggtgaatcatgatgnctaagactgaaaaagaatcttctgattcctgcttctcagcttcccctgcagctatgagtggctatgtgacccagtcctcatcaacgaaatgttcgggaaagtcttgcttgctcctgggagaggtcctcctcaccagntaaagtagacacgggcaggagcacccgtcttccttacatgctttgggtgtagccgtggagaattagatgccttgaaggttgcagcagccctgaggacaagcaaagaaacccaaaaaactgcagagagacacagcagaagcctggcattgttgactcacttacc

SEQ ID NO: 479 - DNA, 337 bp, homo sapiens
  misc_feature (1)...(337): n = A,T,C or G
gaacatattgttaccatgcaanctcaaactcctanggctcangggangactncngcctnaacctnctgaannncngngacnacangggcnagccaccacgtctggctaatcctttcacttttttgtggananaagctattanttataattacccaangcggagtctcaacttcgaaactcctggcnctcaaagtgatcctcctgcctttggcctccccnaaantgctagggatttacagggcgntaaaggccacctggtggnccccgcccttatccaanggaaaaacttttcccaagctggtaattttctncttntgggaatttccctcttcccttt

SEQ ID NO: 480 - DNA, 327 bp, homo sapiens
  misc_feature (1)...(327): n = A,T,C or G
tggggggggaagccttaaaccctngccattttaaaagggttccaggaaaaacntggnaggggaaaatgggaaggaaatgggccccttggaggttagggccccccaaggggagggggaatggccttggncccaaaangggggggccaccaaagccaaagaaagntttccggncccttttggnaaaggcccccaccaaagnaacntngggnaccctttggnaaattttncccaaacccccaatcnttggcccttggaatccaaagtccatttcggnaatggcntccccaattggcccntaaagttttttttncaatttaaaaaaagtgg

SEQ ID NO: 481 - DNA, 154 bp, homo sapiens
  misc_feature (1)...(154): n = A,T,C or G
ccctggcctttaaggtcaagaaaactggaggaaaacttggtttggccccattggggactttcttgtaattgnanngganaagggancaaccntangnacttacctaaggaggaacccccntttanagggatggggtaccttgttttttacaaca

SEQ ID NO: 482 - DNA, 166 bp, homo sapiens
  misc_feature (1)...(166): n = A,T,C or G
ggaggaaaccggagatcacgaggctgcctgccggcactngtttccttggtcttgcctcagatccaaaagccancccnggaaggaacncctctcattttcnanaagaangggattccaccccccattccaagtcccctccaaaaatatntattgaaagaaaacaaaa

SEQ ID NO: 483 - DNA, 183 bp, homo sapiens
gcgcagtggccagagctccagcaaccatcttggacaatgaaaaaaccttcacaatgatagccatggcgaaacacagtggagtaggaagataaaagagactgagaaccggataaccacggagttccataccagctctcctgatacctttcataaaagagtgaaatgagcatctaaaaaaaaaaa

SEQ ID NO: 484 - DNA, 112 bp, homo sapiens
  misc_feature (1)...(112): n = A,T,C or G
ctcatatggtattttttgggtttaaaancgggtttaaaccctncctatnatntaaatcancaantntanatatnaatttatgctttnttcacttcaaacattacaactaaaa

SEQ ID NO: 485 - DNA, 624 bp, homo sapiens
  misc_feature (1)...(624): n = A,T,C or G
gccttacccccttggccaattttaaaagggttccaaggaaaaaccttgggaggggggaacccctttttccctttccccgggggcccaaggncgggaaccttgggctttggcttaaccccccttgggccccgnagggaaaaaggtttttggcctttggccccccggtgggggccaattttgggctttaactttttccccaatgggaaaaagggggaaaaaaaatccttaaatccctttccttccttttttttncaaattgggtcctttttttgggtnttccttnggnaaaaaaatttttncggcctttggggnggggggtnaatttttttnccttgggagggtaattnaaaaggntttngggggttttttggggncctttgggtngggtttttggccccttggggnccggccctttggggnccccgggtngggtncnttttcctttccaacccctttgggaagnaaattaaagggcnttaaaaaggttttttttcnaaggnttttcccccccnaaggnccccccntttttcccccngggggnccccaatttctttggggtccccctttcccccccgggggggggggccaanccccctttcctttgggcnaacccccccttttggg

SEQ ID NO: 486 - DNA, 277 bp, homo sapiens
aaacttgatgccatggacttctgaatgaagaaagaacacatagactactagagacccatcaagatggtactgtttacacatgcaccatggcacacaagaagcacccaagtggaaccatcttccacataccagtttctgatgaataacttaccgacccaacactgcatggaatagaactgtcaagggaagcccaaaaaaaccacaaacaggaaaaattgttaaacaattatgtgaagtcacccaaagattttgttgttgttgttgttaaaaaaaaaaa

SEQ ID NO: 487 - DNA, 310 bp, homo sapiens
  misc_feature (1)...(310): n = A,T,C or G
agatctccctttactttcagtgacggaaaaggaaattgtggcctctgggagtctggacttgactatacttcgctacccttgttcagcatgccggttaaggaagacctcttccaccagccagtactctgtcctttgtaaccccatttacagtaccagaaggatcttctatgtgagctttgggtataagaagacatacctaccagcttcctaggatgagtcttgaaaatcacctgcttagttttcttaaaatgagaatctatagttgnatttgctaggatctggcctaaagaatttctagaaggtgacacat

SEQ ID NO: 488 - DNA, 204 bp, homo sapiens
  misc_feature (1)...(204): n = A,T,C or G
ttttccctctcctcacacggcattngggaagtctgctttaagcactgcntcctttgnnaagagggtacttccacaantatnttgcctngacncaaggagngantgattnatttcccaccacataattnnaaaganntcgtngaaagtcaagcgcaggttgcttccttgnggccncannacactttttgtagaaggaagtggggg

SEQ ID NO: 489 - DNA, 500 bp, homo sapiens
  misc_feature (1)...(500): n = A,T,C or G
ggccaaaccaaccttaaaattcaaggccccctaaaaggaataaccccncngggttgggaaaagaaaaggggccagggaagnaaaagccaanttggaaggggaagggggggaaaaggggaaggggaagaaaacccaccaaggaatttttttcttcccccttcttcccttcaaggttggggaatttttggggggaaaaggttttggtttttttaaaaagnaacctgggccaattccccttttggggccaaaaggaaggggggtaccttccccgcccaagccttatttgttngncctttggnaccncccaagganaaggggganngggggnattncantttccccccccccccaanttttttaaaaaaaaggtccttgggtgggaaggttccaaggccccnaggttttccttttcccttggggggccttccaaagaaccccttttttggttggaaagnaaggttggggggggaaatttttgggaaggttttgggaccttaacc

SEQ ID NO: 490 - DNA, 101 bp, homo sapiens
  misc_feature (1)...(101): n = A,T,C or G
aaaccctttgggaggggggcnnttggccccccaaggggnaaaaaagnccaanttgnaaaccttggggggggggggagggggcctttttccaaaaaaaaaaa

SEQ ID NO: 491 - DNA, 118 bp, homo sapiens
  misc_feature (1)...(118): n = A,T,C or G
attggtgggcactggcctccaatgntaaacctttcgtctggtnggcttatccattccactatanaggaaggaaggcaagangaagaaaacanggaggcaaggaaggaaggaaagtaaa

SEQ ID NO: 492 - DNA, 288 bp, homo sapiens
  misc_feature (1)...(288): n = A,T,C or G
gaaagggcagctgacaggcctgagatgtgggagaacgagtcctgggccctcacagacattgactcaattcatctctggactcctggaccattgcagtagctccttaatcttcccaattctggcccaggttgctacggcgtcttctctacacagtagccgcattgagcttgctacaacctcggtcaggccatgacaagcctctgctctatgcagagccctccagagactcacttttcccagaataaaagcccagctctctacagtgaggncttaagttaaaaaaaaaaa

SEQ ID NO: 493 - DNA, 394 bp, homo sapiens
ccacccccttggtctccccactgctgtctctggcactggttcacaacaaagcgcattactaagccaaagcctgctgagtcgacttttcaactgtgctgaggatcatgtgacattcatcctcccaaataacaattcgctgtgggtaatatgttcctagttaccctgcagcttccagacctaggcctcagaagagtttcataaactactaacaatacaggttgtcttgtctcactgggaaagacttcgtaatatttgttcctcatagaaatttaattatttcgatggtcattttcttttatgccttttgaacaattaccgagggtattaaaaagactcacttttccttctttgttcatcttaacaagctaaaataaaataagccgcatatgaaatg

SEQ ID NO: 494 - DNA, 447 bp, homo sapiens
  misc_feature (1)...(447): n = A,T,C or G
agagggagaaagagcaaccagtgtcagagtgatgcaatgtgacgaagactcaccagccatttgctggcttggaagacgggaaggggccacgagccaaggcatgcaggccaggaaggattctccccggagcccccagagggaacacagccctgctgatgccttgactttaactcactgagagtgcatcagacttccgatctccagaacgatcccagagaaaagagagtcatccctggggatgggaaggcaggatccgcagtggacctgccgtgctttctggaccctgaataagtgggggcctgttttcccatgggccacactcctctggggcagactcctggcatctccacagatcaggacactctcacgtctttgcataagccccaacttgtcactgtataataaagaanctgactggggttttngcctnggttctggaaaaaaaaa

SEQ ID NO: 495 - DNA, 283 bp, homo sapiens
  misc_feature (1)...(283): n = A,T,C or G
gtggggtctttcaagacccccagacaccccgagagacgccgaagacccagacagagccacgcagccacgcacactccacagacgcacggacatccactcagagcccgagacacagcgccgcgaacactncagacacacgcccggagccccagacacctcgnagaccagacagtgtctcacacgcccctccacccccgcccaaagttgataaagagccggcctaaatgctccatcgcgactgccctcagggaaataaaatggaaacttcacggaaaaaaaaaaa

SEQ ID NO: 496 - DNA, 168 bp, homo sapiens
gagccgggctgggccccaccagggcgagacatctgctttcaatcagctgcccttctgcccgagaagggggtgagggctgagacctcccccaagcccaacttctcatcacacagaatggacactgagggcaaaggaggcaggagaagctctagagacccaggtcaattt

SEQ ID NO: 497 - DNA, 151 bp, homo sapiens
  misc_feature (1)...(151): n = A,T,C or G
tagatctgccatggaatgctgcctgatcagatntagaagaggcaaaggacagnctctgctcctnnancctcnnaagnggcctcattanactcagattgcnagacttntgngcgtccnaancttgccttaaagaataagacatctcttgtgt

SEQ ID NO: 498 - DNA, 354 bp, homo sapiens
  misc_feature (1)...(354): n = A,T,C or G
aaaaatcaaggaagtcatttgcttacgttcaaaagaaaacggaacttggggtttcagaggagaaactactggaaagagagatagagaaaatccaaacaaaactatccaactcttataccatggatggacaatatctacaggttattaatcaggaaaagggtcaagagaattacagactgctcctttacatctagagattactttgtgctgccatcaatcctttttgttggactgcaatttaactcaatatttactgagtcttaaacatatgcaatgaaatatgctgcatgcaaaagaagattaaaaagngagttagacacagtgcttaatgctctcaagtaaaccacaggtgat

SEQ ID NO: 499 - DNA, 145 bp, homo sapiens
atttatgaaactgtagatctagcatgtgataaagacaaaggcaattcttccaagatgattatgactctcaggacatttgtatgagtgcaaccagtctggaatagaaaactaatgaatgatgggcaagaaatcatcaaaaaaaaaa

SEQ ID NO: 500 - DNA, 153 bp, homo sapiens
  misc_feature (1)...(153): n = A,T,C or G
tatagaaatctagttggcatagtatacnnctgactcttgacacaggacagnaggaaaggctcatgttgagacacatgnangaaagttgaccattctgcaagccaggaaggtagacagtnnttttcggtatttggtccctcaccagggaacgca

SEQ ID NO: 501 - DNA, 299 bp, homo sapiens
atatgggagttttcactatgttgcaaatgccaacaccagttctgtgaatcagaagctaaacctggaaccatggcaacatgaggaagctgaagctccaggatccttgaagcgcacactaaagtggtccggatgccatctggcttttagcagaggtatataaaagtccttctgaaggaaagcatcccaaatgtaggcccttggaatttccattgatttaaattcaataaaataaactcacaataaaaaattacagggagattaagccaccatgagtcagtgaacaaaaacaacaacaaaaa

SEQ ID NO: 502 - DNA, 238 bp, homo sapiens
  misc_feature (1)...(238): n = A,T,C or G
aggaacacagaacactgaggctcacaataggctnaccaggttgccaaggacacagaggaagnatgnagatttacacagagccccaanctgggtnatgcnananatnattctatgacagtnantgtgtcctgcttnccttgtgctgaaaatganagagaaaactcatctagccggcctctctaggttatcatgagattcagcatacacttcgcttcctggaagtgaaccacccaaaaaa

SEQ ID NO: 503 - DNA, 520 bp, homo sapiens
  misc_feature (1)...(520): n = A,T,C or G
catgatgagggagaagttactcanggggccgncttnttggctncagccctgtggaaggcctantgggctttggacctcacagccaatcagctaggaagccaagactgaatatgtagganaagaataaagacctgntttgtgtgtgaagagttggagtaggaagatcacaggacttcattctggcttcagttcctgcctgggtagattttggcaagttactctaaagtttctgattctccagcacctcatctttgaaagggcaataaaaatactaccttccttttgcttagggttgtagggagggttgcatgagacagaatgtataattgtgctttatgcactgngaaaatctgtgtaaatgttagacttggctactgctatgacatcataacttctggcgggagagaagccctttaatgactagctctctcgcttgctttgnttctttcctgnttccctgctatgaggntgngaattcgtggctataagggtatgcaaacttgtaccatgaatgtccata

SEQ ID NO: 504 - DNA, 219 bp, homo sapiens
  misc_feature (1)...(219): n = A,T,C or G
gctaccttggcattttaaggtcaggaacttggangggtgcnagcccatagcagccaggggagngnangnancttggncccngnccttgnaggggagcctcccactttgggggcccggcgggnaggaattnncttccncgnantgtnggaccctttggnggncctntttaccaccaaaaggggttggttggccgccaacaagggaaccaccaagggccac

SEQ ID NO: 505 - DNA, 243 bp, homo sapiens
  misc_feature (1)...(243): n = A,T,C or G
ctcctacagtcggggcctgggccaccatcgctgctctcgcatggctgatgagccttatagagcctacatcacatctcttggacctggaaggggaaggaagaggaaaggcctggagactcaccaaaaggaaggaattcagcaatggcagnagtgagccccgaagtcccaaagtctctggattattctttccaccaagccatgttacgcccctaattcaacacttgtcatttctaaaaaaaaaaa

SEQ ID NO: 506 - DNA, 340 bp, homo sapiens
  misc_feature (1)...(340): n = A,T,C or G
aatgttcaaaccaggttttacccgggnatcaacattatggtcattccgtttattctgaagcccacatacaaggtcttggaagcaataatcccgcacaagggtngactagcgatgnaaaatgcctaaacacctttcctggngntgggcctttgcggcnatnncctggaaaaattcnaaagtcccccttgnatttttcaagcgttgggggccaccttanaaattaaaatttctttccttaaggaaaccaaaacttccaccgttgntnggtnttaatccgcccttttgcaaagaatnggngggggggnggcccancccaaccttggggggggaaggaaggggc

SEQ ID NO: 507 - DNA, 460 bp, homo sapiens
  misc_feature (1)...(460): n = A,T,C or G
acttgcctggggctgcttctgcggcttcgtgttcattacctgcctttgtttttatctgctctgatgaagcggtgatgttctccaagattgatagaaagagcctactgatccaatttctacgagaaatgaagactatcaagcattctaaatttcctaaacattgtacaattgacagttggctggagcatccagaagctnattattgttgagntttatgggctgaattgggnccctccaaaattngtatgtnngaagctctaacccacaaaaacctggggangcnccccgcatttggaggtaggtcttttaggaggtaatcaanagntaaaatgaaggccattaanagagggccctatcccaaaaangactngacntncttacaanaaaganggngatttnggcccccaccncccncnngggaaggccnngttngaagaccccagggagaagggggacccat

SEQ ID NO: 508 - DNA, 457 bp, homo sapiens
  misc_feature (1)...(457): n = A,T,C or G
tgagaattcagacttatctacagagctgtctcaggaaaggggaagaagagatggttcctgatgaccacacccagtcaccacagtgactgcctagaagagccatagaaccaactggggtagagtgaacaccagtgacctctgccctgctgcatcccaggcctgagtcctcagggcagacggctcagcgagggcacccggggtaggagcctggtcttccacagggccagatgcacccaagcctttcacacccacttctaagtacaggagagcacgggaaggagagacagccagggctaattccatgcagattttacgatggtttgggacagattctctcagtactttcagagatctctccatcttgtcactttcatacaatgngngntatttttnctccacccccatccatgtcccaagttactctgcataaaaattcttgagaacaatcaaaaaaaaa

SEQ ID NO: 509 - DNA, 384 bp, homo sapiens
  misc_feature (1)...(384): n = A,T,C or G
atataaaatgtaaacaacgcactctaagttgccggaacaaggccaagcagcgccccaccagccagggaggagagctgcttgtgacatgaccacctgctggccccagagtccccttgccacccctgaagggctacgaatcccagaagcacaggtaacacagccacgcgactcccaggttgatgcagggacagatggttgagcggctttccacctctgcagctttagctaaattatggaggctgagatatgcagagaaacatcttcaggaaatacacacaggaggtgcaataaaacacttctggggctatgtgtgntctgnttatttagcagtttgtgaggtgaaaaacacatcagagtaaaccacttttcctccaaaaaaaaaaa

SEQ ID NO: 510 - DNA, 313 bp, homo sapiens
  misc_feature (1)...(313): n = A,T,C or G
attctgatcccaaggcctgcncctggccntactgcatggagacaaggaagtccatggggttctttagagaacactcaacanctaatcgagtcaactntgccctttatgctntgaacagttantacgagggcctncgctgggaacacactgctcctggcaatcactttattgacatctgtggctgtgtgccactaccntnncgnacaanantncngcncnaaaaccnacnnctcacntcaaagaancnacncnacnnncaccctgtggacaaagctggatattgctgcttaataaaagctaatgatggtaaaaa

SEQ ID NO: 511 - DNA, 113 bp, homo sapiens
  misc_feature (1)...(113): n = A,T,C or G
taccagcttgtgatatacttttaatactanantctcttaaacttnggaaanantgaangccaggnccaagggtgggccaatanaagctttgtgattnaacaaaccctgaattt

SEQ ID NO: 512 - DNA, 159 bp, homo sapiens
  misc_feature (1)...(159): n = A,T,C or G
gcttttctttaacacccctgncaagcagcttccctgctttcaacttccccaagaaaaaatgcccacgccccccttatagaacctngncccttttnggaaacagntgggnantcccnaaaagccttgaccccncangagaccctttggaacttaaacacc

SEQ ID NO: 513 - DNA, 147 bp, homo sapiens
  misc_feature (1)...(147): n = A,T,C or G
gtgttggtcttctctgcagcatatctccagatcatcgtcagcaggactgagttgaacaaattgaagaaaacaacagtattgcttttcagattcngaataatttgcaatattaaatttgtagatcaaatcagcatttaaaaaaaaaaa

SEQ ID NO: 514 - DNA, 286 bp, homo sapiens
ttaagagctccaaaatcagactgcaaagctgtgtcttatttccgagcattctttgtgacaatggaaaagacttggatggttgcaaaactgcagcaacgtacagaacacagttatcacacacggtggaggggccagcaagaaggtgctgactcgtaaaaagtgacatgaatgacagtaaggctgacatgaatgacaacgagggctacaaccaagtgtatgtttgctcccatctgaaaactgaagccaattctttaggaaaataaaagacaagagagagaaaaaaaaa

SEQ ID NO: 515 - DNA, 365 bp, homo sapiens
  misc_feature (1)...(365): n = A,T,C or G
gcaacactgcagcccanggaaccacccggaggctgaccagccttcccgtacaagccatcagaaaggggaggccacccgggtgcccaccagcgggtgatgaagacagacatggaggacgacagcgaggaggaacctcaaacctcgtgctgtgtgaaaggagcccatctcgagaggtcacacagtgtaggatagggcgtaccagctggcgggtctggggtctcctgggagggtgaggaaaatgtctcggaatgagataaaggtgatggctgcatagcacgatgaatgcacaaagggtcgctatgtttcaaaggggttattttatgcaatgtgaatttcaccttcatttaagaaaaaggagaaaaacg

SEQ ID NO: 516 - DNA, 285 bp, homo sapiens
acatacctcacttgcctgtggtccagtttggatagtcccagcacagctttacaggaataggccccaaaccgaacttccaaggaggaaggatctgatcggctcagcttggatgaggaagcggagggagagtggactggaaggaacttgacccaggatgctgagtaagcagagctgtgaatatttgagttcaagcagttgggctcccaaagccggtgatgttaaccctaagcaccttgtcatcattataatagtaatacttcatttctagctactcagaaaagaaaa

SEQ ID NO: 517 - DNA, 328 bp, homo sapiens
  misc_feature (1)...(328): n = A,T,C or G
agtcttcttcacaagtactttttcaggcatctaaagccgnattccctggccanagaagncaacaagcccnaatncgtcccattcccccagntgggattcgngatgaaaaaactgngaaattaaaagatcaagtgtgaccanacttccanaaaaagggaggaacatttnggntaaggaaanaaccccaaagncttggngntctnattnanggnaatttgccaccaatggangcattgtgnctaccaccattatttttanttgcnttngctccttggaaaaagggntctaccgcaatccaatttggttttancccacttaattccaaagg

SEQ ID NO: 518 - DNA, 266 bp, homo sapiens
gcaacccacaaggctgtgctggatgtcagtgaagagggcactgaggccacagcagctaccaccaccaagttcatagtccgatcgaaggatggtccctcttacttcactgtctccttcaataggaccttcctgatgatgattacaaataaagccacagacggtattctctttctagggaaagtggaaaatcccactaaatcctaggtgggaaatggcctgttaactgatggcacattgctaatgcacaagaaataacaaaccacatc

SEQ ID NO: 519 - DNA, 110 bp, homo sapiens
  misc_feature (1)...(110): n = A,T,C or G
agggcgcaatcacccaatacnttatcaccaccactanntctanaatntacanttatgttgcgctgaattcancntangagaaattgggattntcccgttacgtctcacct

SEQ ID NO: 520 - DNA, 317 bp, homo sapiens
  misc_feature (1)...(317): n = A,T,C or G
tagaactgtggccaggagtcaagccccaggtcaagaatgctggtcagccagcagactcacatcccagccctaccttcctgatacctggatggtgggtgctcangaaaaaacaagggaatcccagggcttgttaccccagtgtctccattgtgccctccacaggatgcacttcaactgtcctctcttcttggctcttcctcctacaaacttggggcaaacctgggaatccagnaaccaagangacttttgggattgaagcaattcccagtngttaaaccccaanccctaagttttttttcacccaccgaattttgggg

SEQ ID NO: 521 - DNA, 411 bp, homo sapiens
  misc_feature (1)...(411): n = A,T,C or G
ggtccagaaatgtgttgtaaactgcacaagcttaaaggtctcatccgtattttcatctatggcttgcttctccatttcattcacaaagatgttgggagagatgtaaacacccgagtagactatgcacaccacagtccccctgctctaccaagctacttttcttctggcgaatggctcaaccccagctcttattgctcattgccatttttctgatggaatgcagatatgctgactggagcaggagcagccatattgcattataaggtaaatttaggaatggagacatgtttttcagagcaaaggaggaaaggttcaagacagaagaagcatttgtggntattgatatcataaagcatcacttcagcagccttaaactgntgacttaaaaatttgggggaaaaaaattaactt

SEQ ID NO: 522 - DNA, 471 bp, homo sapiens
  misc_feature (1)...(471): n = A,T,C or G
gagattgggcctacctgtggatgcctttgtacagaactagaagaggactgaaggataatttaattcagccttctcattttccagactaattgcttcctgaactaggaagggtgtccaaacagagacctaggaagtttgatatattccggatccttcaactgctgggattccagatgataaataaactgcgcagcggaatttgtatcaacctattcacagacttgaaaggagtaagaggggttctgggagagaaggtgagctcacttctgcagatgacnctactcactggccacaccatgctctataaacaccctgcaccatctntgatggtcagcctgccangctgcctggannaaaccgnccttgcttctgggagccttggaattaaaacacttcactttataactccctntttattttttcccganngaggttatttttttaccttggctcaaaccatttgggctggaa

SEQ ID NO: 523 - DNA, 301 bp, homo sapiens
gtgcaggatgatgtctaagcactcaccgtgtcccctgaagccacatctgctgtgtctcctccaagtttgactccagctccaaggactgaccttccccaacccaagacttcctccaggctcctccctctccaaaatgctctctccagatccttgaatggctaacttctaattcttcagatctcaacttagatgtctcctcggagaggccgctccaccccaaattctcactgtgccccacagcgctgccgagtcccagtgcccctgctcatgtgcacacccggggaggctctgttgcgagctt

SEQ ID NO: 524 - DNA, 131 bp, homo sapiens
  misc_feature (1)...(131): n = A,T,C or G
gtatttattatctcagcaagaatatgaattataataataagacaaaaactcntttctatacgaactgctctttcagttgtagccactgatgtaaatanaaggaagttaaagaataaaatgctcgttatttt

SEQ ID NO: 525 - DNA, 408 bp, homo sapiens
  misc_feature (1)...(408): n = A,T,C or G
ctgaccctttgatggagctactactgagcagtcacatgccctgaagttgntcactttctacccagagcatcgtgttaatgcacatagattctgcaacacaggctacaaagattcaaagacagctttgctgtttgctagctttgtgacctcaagcaagttactgaaattcctgtccctccgttactgcatccatnnaagggcagttgcaaaactagtacctgcctcatcagggtgntgtggggttgaaagtgaattaatatatgttcggtctcgaggtcagcgcctgttgcataancactttgtatctgttattattgccttcaaaactctcttcattgnctgggaacgactttccagcggcttgcataaattaagtgtttaatanatacctcttcatgaaaaaaaaaa

SEQ ID NO: 526 - DNA, 298 bp, homo sapiens
gccttgaaatacatcctgtgatcggtggggtcccggctttgggagcttctagcctgttctaccacatagctgtttgtttcacgcttctaaccaattaacttgaaataacaccctgaatcagaggtccgaaagaggaaatcaaagatgccacatgatgttcatatggagctccgagaagaacactttgccaaggcctggagaccctccagggctgggagtctatggccatttccacaccagggctctggggcctccactgacaaagcctacctccctgatcctcaaagagctgttataa

SEQ ID NO: 527 - DNA, 234 bp, homo sapiens
  misc_feature (1)...(234): n = A,T,C or G
cacaaatggcaacccccataagaaactcaatngtctggcnttttcttcttaacttcccacccaatttngggnaanggggaaacctcttggaattttggggtaaggttattccctggggccccccaagtggaaaattggaaccttccacctggcaattaanggggcctttcctccttgggtttctttnaactttcccccttcttcaacttgggggntttggaacaaaatcttggc

SEQ ID NO: 528 - DNA, 356 bp, homo sapiens
  misc_feature (1)...(356): n = A,T,C or G
attaagaccctggggcttggagacagcaagtgactgtcccaagatcactcagctgataagtgatggagccaggattccagcctagactgtctgantggaaggggcttgnacntttnnnccgaancccaaatgggnanttcnatnaanncagggactgnnntttttgantntntanccaaccncctgccacatggatacntcatggaaacttgacanaacaaaggatttattttttattaggttaaatctgcttcttgggtactgtttgcttgctgcccattaagtctggacatcttaaattttgaaaaaaaanggcncttggattaataaaaacaacctgggaccggaaaaaaaaa

SEQ ID NO: 529 - DNA, 372 bp, homo sapiens
aggcttaggaaaaagcagatacctcccagtagcatgaagatgcaagaagctgcagttgcctgtagcaaacacaacgtgattgtaacaggtccccatggcccttggtgcatggaaaggtggacaagcaggggatcccgtttggattctctgagaaacttctcagcttgaccacgtctgtctcaaggtttggctgcaaggagtcacacagaaaaccttgctttcctacttcctctggccaggaaccttctgaagttcgctccatccccaagcaaagagttttcattccaagcttgagcaaatctggcccgttggacttgaaatcaatgagtatgaaggaggaatacaccttttcccttttcaaagcaaaaaaaa

SEQ ID NO: 530 - DNA, 206 bp, homo sapiens
aatgaaaagcattggctgcctctgccaggatgacaactttacagtgagaagctggagccgcggaccatgaactcctggaaagttctatcagggcctcagaagggctcaccaccttcaccagcctaaacttagtggtcacccatcccacgccaccctctgcatagacagggcatctgtgatatgggaattttttaaaaataaaaaga

SEQ ID NO: 531 - DNA, 198 bp, homo sapiens
gtggatgcttcatcctctcttcccctctgtggctggatgcacacgagcacagccagcgtggatgccaaggacagagctgcgagatggggagagcctgcgttcccagacacctcttggaggagagctgcccacagtcagcaacagccatttgggactttacacaatcaataaataaacttctactgtgaaaaaaaaaaa

SEQ ID NO: 532 - DNA, 494 bp, homo sapiens
  misc_feature (1)...(494): n = A,T,C or G
gtggtgttgaaaccgtcttccctgcanaggctcttccggtgaagccgctggcctgtaaacacacttttagccagaccctcctcggtgccctgagtgccaagcggatcctcttctaccatcttgctgcccagagttcccatggggagatgggcccacccagctccacaccccagaaaacctgtactctcctgcatgccttcacccacccctcaccaaacacaggctgggcagcaaccatgtcgctgtcctggaagggtgacagtcacaggctcagaagcagggatgtcctggggaagtcaaggaatcgcagacctccaccccacttcacctgaggattggcactgcangacgcatccccctggggtctgccggaggtttgggtaacaccttcatggcagangctacaaaaatcacttggcangtgcttctggcaccangaggaatgtgaatcttgaaaaacancattttggtgggggttggaaaaagcaaggccc

SEQ ID NO: 533 - DNA, 232 bp, homo sapiens
  misc_feature (1)...(232): n = A,T,C or G
ctcccctggcatttaaagcccagnaactgtnngaaaatccctggggggccttgctttcttgcgggctttcgtagttcatttaccctcgccttttgttttaaanaccanactcctanacccngngccgccgcatnggntcctncccanagnatttgnattacgcaacaggaggccctnacctgnatgcccanatttttcttaccnaagcaaacatgggaaagcaccttattca

SEQ ID NO: 534 - DNA, 364 bp, homo sapiens
acaacaaggaacacataatctggtctcaggaaacattttgcatcatctggtaaagggatttctgcctcatcagattacagactacatgtgaagccttgaaggatagctccaaggagatgcgtgagcacaaggcagtgtcctcacagtgagctaggaagaggcttgcactgtcactgccagtccgtttgtgcatcagagaaggcctaagcgtaattgagcagtcattgctgtctcctccagggggaggaaccatcctcctcacagatggctgaagatcttatgaagctgaacctcccaacaaatcctcatatttcgatacaaataagaatatgattgtcaatattcatacaatgttttaaacctt

SEQ ID NO: 535 - DNA, 279 bp, homo sapiens
  misc_feature (1)...(279): n = A,T,C or G
actccctgcctttaagntcagaaaactgtagagctgggggggngccaaangggggtcaaanntggcttcaataacgggnccccgggtctncccggaatgctcntacttcccagaacaaaagaaggnngcccccatgaattccacttgtgggttcatccatnaaaatcctgggaacttagtcaccaattatttttggatttagtcaccagaaaangtagnttntnaaggcctgtttggccattaaattttncanggggtggggggggcagcaaggaaagg

SEQ ID NO: 536 - DNA, 463 bp, homo sapiens
  misc_feature (1)...(463): n = A,T,C or G
gacatatttccagggagtaaaaccaagagatcagcacattttgaagaatgtttttcaagctgcttttctaaaggtggctgcttgggatgactccactcccattcgctcactcccacacctcccacccatgcttgcctggccctgccattaacactgcagaagaacatccaagtgtttgcattcccagcatcccttgctgcagggttggcatgtgacccacttttgggcgatgagacaccaacagggtgctcctggagaccctctactttcccaggaggcgaggctgccatcttgccaccacaaggcaacggagagggccacgtgcttaagncgatgaacagaaagctttgnangagcccagtacttggcatcaccaagcagctgaccaaggccatcaacccaccngttttcagaatttatgatgtcagaaaaataaaccttaatttggttaagccaaaaaaaa

SEQ ID NO: 537 - DNA, 568 bp, homo sapiens
  misc_feature (1)...(568): n = A,T,C or G
gaaaacatcctccccgccagcctctcacagaagagacctagatttcatctgccacgtggagcaggcggtctcagaatcccacccggagcagggtccagggcaagtcttggaggacagtcaccaagaactgctttggattcgggaacagagctgcctaacccatccgcagccctggggtcctgccctgttcctctggccccttcagggcagcgggggaagcagggaaaacagcctgtcagagatggcagagaaaccgagcaagaataattatcctggaaaagactttcagaagtaaccaccagaaacttcgagtccccagatccaaacagctgagaatgtggggcctgagccacgctctgactccactcccaccacatgaggagaaacaagagctgcttttctggaagacttgaacaacccctgctggctctggaaggacacatattccaaagaacaacaggactcagatgaaaactggatgacaattagaagaactatttntnaaggctgggccagnggctcacacctgtattcctacactttaagaggccgaagccgggggttcata

SEQ ID NO: 538 - DNA, 756 bp, homo sapiens
  misc_feature (1)...(756): n = A,T,C or G
cctgtcatttatagtccatagaaantgaantacagtaacttgnangcagcagngctggggcagcgagtacctnttntttgggnagaagcacgacncncgnactcgctntcattgctgtgntgggctcctaaaaaagaccatgcacgtatccccgattctctcatcgccagaaaaggttagaaacaagcccaaatactcttncgacatcctncaaggccaaccgccgcggtatggnaaaagggacccctttgtanaggtgtcccgcgngcggacacaaccgtggaacctcgtcgccttccgcatgctccaccaagttcgtgccttggacatacccagccaagcccctagagcaccaaanggttgtgtactcaagcncanggctanagnactcccaagtacacaaatccccacacacccggggcntgggattcctgaccgnaccanggggaccccnangtatcggcccaaggntgggaaaaaggtngnaccccaccaagcncccttggcttctttaaatacaacaccccctgnggaaanggcctnggacccaagnttctttaccggccaccgngnncnccgnaaaggccggtccgggtnccaaaaggggnaaagttaaaaaaatgggtnaagctcttaagcaaaaaattccttttaaaagnccccccaaggtnaaaaattttttnttcccttttggtncaattaccttttaaaattttgggtgttttttaaaccttaaattttaacaacccctttggt

SEQ ID NO: 539 - DNA, 159 bp, homo sapiens
  misc_feature (1)...(159): n = A,T,C or G
cccccccttttgaagcnctctggggggaaacctacctggctttaactccagnaactggcagaaaaattgaccacnnnaggcaccccccaaaaaatttatncttaggaaaacaccaccggggggaccacnaggaacaagccaaggataaatttttgggaa

SEQ ID NO: 540 - DNA, 362 bp, homo sapiens
  misc_feature (1)...(362): n = A,T,C or G
aatgtttattggaggcttgagctggganacnggccaccatctcaaaccgacaagttttcatgtttcatcacagttgcttgacatttttataaaaggaacgcaatattacagataaggctgcctccttgttctcgttctcagggcactctccccgcaggtaccatgaatttcacccccctgaatctggcgtgggtttctccagtccactgtttcatgtttacacctacagaaagagatatctatgaataattcataagtgtggnttgccagtatgtttttaaacatttcataaatgatattacacagtgagcttgttttgcactcaacataatggttttgngatgtaaccatgttgatatatg

SEQ ID NO: 541 - DNA, 108 bp, homo sapiens
  misc_feature (1)...(108): n = A,T,C or G
agcagtctcagcgtctcaacntgtgctttcctccntccagtaccctctgaactcctncaancanacatntgttncctgctnncacattcgctggcaaccatttcgtgg

SEQ ID NO: 542 - DNA, 274 bp, homo sapiens
  misc_feature (1)...(274): n = A,T,C or G
gaatttgcctcggaaacnctcttcattacngggcaccaaaaaaggcatttcatgataccattttgncanngtggacacttccatcacttccctgtgnaaaatgntccaagtntatctttaaccaacanaatagtnattgnggagaaagggaanggaaccagtacaacactacctcgganaggcagacatcttctcttatcaagacnaatgggaagctgtnggatctatgaaagagcacaagactcacctgccantatacctggattccaaatga

SEQ ID NO: 543 - DNA, 282 bp, homo sapiens
  misc_feature (1)...(282): n = A,T,C or G
gtaatcccggccaccagtctatgaagtgggaatcacttgacatagaagaggaacagagaacactgaggctcagagaggctaagcaacttgccaaggccacaaaggaagtaggcagcagccaagaaccccaacctgtgtcatcccaaagtttattctatgacatcattgtctcctgcttcccttgnctgaaaatgagaagaaaactcatctagccggcctctctaggttatcatgagatcaaatacaaacacttcctggaagtgaaccactcaaaaaaaaaaa

SEQ ID NO: 544 - DNA, 440 bp, homo sapiens
  misc_feature (1)...(440): n = A,T,C or G
actgctgctaccctgccgagaagtttgctgcccgtggcattgctacttccatgaaggaaatctatcttctcttttcatgtctttgttctgaaattttcgctgtggtatttctgagtataagttggtttggctgtgttgcctggcgctggccgtgtcttctcacctgagatagctaagtttcagttcccagcccttcccggccatctgtcctcccgtggcacctctgcaccctgacataattcttgttctggatctcctaaaagggagtagcttgcacccattcagtgtcttctccatctctcaaactgcgcttcccagtattggtctctgtgttctcagtttacgatcttccagtttactaagttctgtctccatccaattaagtttgtttaatctgntgagtttttaaataaaaccgcattggtctccaaaaaaaaaaa

SEQ ID NO: 545 - DNA, 127 bp, homo sapiens
  misc_feature (1)...(127): n = A,T,C or G
ttaattttgaaaaattangttagaagaantctacgattcanctaagantancactcacaaagacncagaatgtgtcgtcttagaagttagcctttcagtaaacgcctttggggtgttgggggatggg

SEQ ID NO: 546 - DNA, 331 bp, homo sapiens
  misc_feature (1)...(331): n = A,T,C or G
gtgcttgcctgctatgctgtcaaagctttgtgagcactgtaattagaacaaaatggatgtccttggaattaaaaccccaagtcagtaatgattgaccacaaagtagacttgttcaattgcccccatcattcactggtatataataccaagtaccaagattcttaccattattatgtcatcctatattaattctttcattcacacatataggatgaaaaacaaaggaatgtttatcctatataatgttcctttatgatttttgnaataccattttactggtggttatgcctatagcacccattcgactgatgnttataaaccaaattgagaa

SEQ ID NO: 547 - DNA, 138 bp, homo sapiens
  misc_feature (1)...(138): n = A,T,C or G
ctgaatggaaacctttcngangncggcttaaccattccactataaaggaaggaaggccagaggagaaaacnangaggctgnggaggaacatccaaatgatgttgaactggggaaaaagaaagagaatgtgaaagagga

SEQ ID NO: 548 - DNA, 502 bp, homo sapiens
  misc_feature (1)...(502): n = A,T,C or G
gcacagctacagccaagtcagaggccctggggctgactgggacccagaagagaaatgagagctggagaagaggaacagacaagcctctccaacacagcacggnctctagctaggctggctctgagacttctagtgaccttgagacctcataacttcagaaatcctttatcctccagcctatcaacaatcaagagtcagacaacagtgtatcatggaatggacagtggtttggggcaatcacctatcaccgaacctgaggcaatgttccctgtaaaagacaaaagacacatctacctgccttcagcctccatcagcattttccagtttttgatcaggagtcagtccttttgcatgcagcctccacacaggtggctcatgctgaggagcctttgtactgagaccttcattaataagcatacgcaataactgctctgacacgacttgngagtatttcatcattttggttaaataaaggngtttgaaaaaagggtaaaaaaaaaaa

SEQ ID NO: 549 - DNA, 429 bp, homo sapiens
gatgcctgggaaatcctcaggcggaaaggaagatgctgccaggaggaaactggtgcagcagcatgtgtgtggaaggcaagtgccaaggggctgtgtcaagggcactgaggacatcggctgaaggggcctttgagatgtatctgcaggttgagatgctgaaacaaggagaagagaattcacatacgacgttccagtgagaagtcaagcaggaggccataattctgggacactagcatgtttggctaaggttagcataagcttttcaaaataatttcctttctaaatatcccttgctgtgaagatatcccctctgcaacagtaactggtgtgcgctcctctgcctctccccagcagcagtgacctcgttgaggctgaattgaatttctggaccaacacttctccctcaataaaatttcactgtgatgggca

SEQ ID NO: 550 - DNA, 373 bp, homo sapiens
  misc_feature (1)...(373): n = A,T,C or G
gatccaatccaggaccccatgtggncttcagtcttcacatctccgcagtctcatactntggcagnntctcannctctacttgtctttgatgatattngaaggaangagacaanatggcattgngnaaccacagganaataagacctataaatatttttgactcagtgggaatagtancatcatgaattgccctgctttcnaagctanntagantataggnttcattggcttggcctgacatgactgcttacagctgatttccaaacattcttgagngnattcctttataaactgttggcaattgtgaagactaaataaaatacagataactctattgcattgggaataaagatgacttttcataaaaaaaaaa

SEQ ID NO: 551 - DNA, 193 bp, homo sapiens
  misc_feature (1)...(193): n = A,T,C or G
aactaccttgcatttaaagtcanaactgtagaacnacccctgncccccctccntgtcnttctaatgctctatnctcaaaccnacnnnccccaaccncctttcncccctagaagcataccttccatcctccctttaaccngncttncttcnctnaccacaccatttctcaatcncacacttctttgaaaaaaac

SEQ ID NO: 552 - DNA, 180 bp, homo sapiens
  misc_feature (1)...(180): n = A,T,C or G
aatccatactcactgcataaactttgcatgatgctgtggtttccaagcatttattcgatgacatagtaaacccactcttattttgtctacactcactttttcccacaaagccattgtgatgctttagttgaatgtgtttggtaaagtaacagtngaataggaacctgccaaaaaaaaaaa

SEQ ID NO: 553 - DNA, 116 bp, homo sapiens
  misc_feature (1)...(116): n = A,T,C or G
ttcccctttgctgactgtttaggtggacacangctggttgcacccatgtananataaanagccntgttgntctncngcntttgagaaccataanaacagtgtgtggtggttaaaaa

SEQ ID NO: 554 - DNA, 313 bp, homo sapiens
ggaagaccagagacatactcttaacaccacatctcagggacttgccgccaccagagagcccatgctgcaatgtacaactctgctgaaagatgacgaaaaggaagtgtgcaagtcctggaacaccaagagacgaacagtgctggaacaagggctgggtagcaaaagaatttcctgcagctctgtttcaacattattttttgtcttgccattatttttgtctaccttaagtcagaagctcctagggaccagaggttatattcttgatatgtcacagtgctaaataaatattgaccaactgactgaattaaaaaaa

SEQ ID NO: 555 - DNA, 203 bp, homo sapiens
  misc_feature (1)...(203): n = A,T,C or G
aagagctgcatgataggaaagaaaaaagtgganacacaatggagaaggctgccntctgccagccanaacgagagccctngctgggaggtcanncntgctnnnaccctgatcttatacttccctgcncactggtttctatgaacacacagctttctttctaggtctcagtttactgatttgatagatttccaatgtgaagctgg

SEQ ID NO: 556 - DNA, 371 bp, homo sapiens
  misc_feature (1)...(371): n = A,T,C or G
agtgaagcggatgattctgctttgagatgagtccttggatgatgcactgcatgataggaaagaaaaaagtggaagagctgaatgaggagagagaagatacattagacacacaaatcctaagagtcttctgacaatgggatgtgctgtttctttccccccctgcccactgttttctatgacacacagctttctttctaggtctcagtttactgatttgatagatttccaatgtgaagaaactgcttttaaagttatctaagaatgcttgggtgatgtattcatggtggngttcctttaaacatcaaatgtctttcttgccttaaggccttattctcaaaatatggggtccctcncagtaaacaaactttatg

SEQ ID NO: 557 - DNA, 369 bp, homo sapiens
  misc_feature (1)...(369): n = A,T,C or G
gatagaaaacaagttccactgctcaaaattactccttgaaggggatgagggacaccagggatatgccaccgggaccacttgaagggaatgggtgatgggnttnaaacaaaggtantnttttaaatggagcaagagccnattgntttgctcttgctcttgtccctcaccccctcaaagaagaaattttnccctttattattanagcannngntttntctctttnnancggaancttncntngtttnangggaaantggccnnnncttaancnaaaattggttttaataaagttgcacncancctccanggcaccaatttgtccgnaaattnaaaaggantattggaaaattnaaggtggaaaaaaaaaaa

SEQ ID NO: 558 - DNA, 382 bp, homo sapiens
caacactaatcagcctaagataccaggtgaagaaggcagagaagcagtgaggagggaaggaggagaacacagattttctccctctcctcagtggatttgggaagttgttttaagactgcatccttggcaagagggtactccgcagctatgtgcttgacgcaagagtgagtgattcatcccaccacatctcaaaagtctgtgagtcagccagttcttcctgggctcagacctttgtgagagtggggatttgagttgactacgtgtgttgaagtgagggcgttgaagattgtgtaatggttttgttgctttttaaccagggtcaggattgacctttggtgtgttgtcagggttgaaattaaaaggtctgggtacaaaaaaaaaa

SEQ ID NO: 559 - DNA, 332 bp, homo sapiens
  misc_feature (1)...(332): n = A,T,C or G
tacctgcattaagtcatgaactgaggtaccatgagcaatgaggaagcaggacccagacccctgactcctaactccaggtgaagcccaccctgagctcaggagcagagctgcctccatcgggtgtggagagacagagcctcctccccagccatgcctcctcatcggcccacgggagctgctgtgactctgacccctgtacctgnctctgtcgaccggaatagtcangtgggcangccagcacacctttgggtgctctgtatgagtgggattttctcctgattagacattttaaaagattgncaacaaaaagaacaaactctgtaaaataaaaa

SEQ ID NO: 560 - DNA, 270 bp, homo sapiens
  misc_feature (1)...(270): n = A,T,C or G
gcaatttcttggtaatgatgcagaagtaggcttggaaaccaagcagaagacaggaaggtatttagcagcctggaagatgcctgataaacccagtctgatgaggtgctttcctaccttnaccactcaacnctctnggtggctaccaataaacttggcatgccatttgggataanggggtttgnccngnacnaaaagtaacagnggnaccacccaatttgnggantaaaactcnngntttatttttttaacccaaaaatcctttttgggtat

SEQ ID NO: 561 - DNA, 219 bp, homo sapiens
  misc_feature (1)...(219): n = A,T,C or G
atgccacattttgcttaggatgtngtctngatgtagantgcnagtagnaggcaatnggncncaccttttgcangggaaancaccatgngcagtttctgtntggtaactgataattcttcttcaccacatcngatgcanaccagctctatngatattttgtctacaanccccaacataantgttttgatccttatatatctgntccccttactacatagt

SEQ ID NO: 562 - DNA, 131 bp, homo sapiens
  misc_feature (1)...(131): n = A,T,C or G
ttgatgtagggctctccctaccttcaccacctcaacactcttgccttgctaccaanaaaactgtnactnccntttgggatnaaaggggtcttgttcancnctacaaattacaatcggatcaacatattttg

SEQ ID NO: 563 - DNA, 220 bp, homo sapiens
  misc_feature (1)...(220): n = A,T,C or G
cctctatcctgaagagcgttggaccctggagctgctggccacatcttgatctgccatatgtggnccaagaatgaagtcaacacgaaggagaatgaaggtgctgagggataaagttattgacattctaggagctcctggatcaaaccatgcctgaactcaatttatcccttgaacttttcaattacatgaataaatcctccttttgcctgaaaaaaaaaaa

SEQ ID NO: 564 - DNA, 153 bp, homo sapiens
gggaaacccttcttaaagcaagacaggtcttccttgagtttttcatacttgaaacacctgaagattatcagcagaactgggaactgaattttcaccttgtaatgtcactaaaatgccctttgttctatatgcactcagacaataaaaagaaaa

SEQ ID NO: 565 - DNA, 186 bp, homo sapiens
  misc_feature (1)...(186): n = A,T,C or G
ttcccaccctctttgtagncaaaggttcaagcctaggnttaagctccacagactagnaatgtgngccacatctcttttagcgtttttaccctagagnacaggaaaattacgtcatgaaaggaccacgcgtgcttggtgtnatgtgtgacgccccnacatgctgtncacgaagggaaaaaaaaactg

SEQ ID NO: 566 - DNA, 302 bp, homo sapiens
gtgttgagactgaggttcagaggccaagaagcttacacatgctcacacagccagggagtagcagagctgggatttgaatccaggagtgtctaatcccaacgtccaagacttccatgaacccatcctgcttcccttccaagtctgcaagggaggtccggatacaggagctctacagggcattgatggtagcttctgcatttacttaatttatgtaactttcactgatctagtataatactagggactgactgtttcttgagctttacaaatacaacctcatttaagcttcattaaaaaaaaaa

SEQ ID NO: 567 - DNA, 541 bp, homo sapiens
  misc_feature (1)...(541): n = A,T,C or G
ttgttaggagccactccgtcatctgctgctggattttaatctaggcctctaatatctttggcgacatccagtttatcctgagttttcggagggactggtggccactgcttctcaggacttcctggaggactcagagatttcctggccaggatctgacctccttcaggattgacaggacaattgtggagccccagtctctgaaaacctccaacaagagaagaaaacaccggtctccagggagagagcaaagggcttaacgaaacgatcccctctccaatgccccttctccctgagattctgcagatctagggaagtgcaggtgtccagcctgtgggtgtcagaatggctggggagatatttcccccacacggacagtcagtcacattggtcacctacatgncggtatgggcagaaatcacagagtcctcacctgggtccacttacctggtgcaacaggacttattttcaaatcatcaaggccaaaaagcgatcggaatgagaaaggggcttcaacagcangcggatcatttttccccattgg

SEQ ID NO: 568 - DNA, 214 bp, homo sapiens
  misc_feature (1)...(214): n = A,T,C or G
tagagacggagtttcaaccatgttagccaagatgttctcngatctcctgacctcganaccntcgcggnttngggctntctnaactccnccctccctgggngctngaggccagaaagcagacacttcctgcagctgcagttacacaaccgatgttctggggatttttntggncaatantgatgcgatcctatattctanaaaacccccatccatt

SEQ ID NO: 569 - DNA, 105 bp, homo sapiens
  misc_feature (1)...(105): n = A,T,C or G
gacaagaactacagcgagaaaagggagacagaagaggatggacgttgctttgcaatcaaattgcagattttttnccatgcntactgggnttgggaaaaaaaaaag

SEQ ID NO: 570 - DNA, 467 bp, homo sapiens
  misc_feature (1)...(467): n = A,T,C or G
ctgcatccctctacccaggcgaagaaaggtatctctcctgggaccaccttggctctccttcatgggagttgtattgcagcaggcagctcattattcttctgctcctggaagtatatgtttcaataacgatctgccttgtgttcagactccatgggtcaagggttaatgtcctcctactgcaacataaagtatttttcatctgatcacactgtgggcattggctgaaaaatgaatctgctatccatgggggaccaagacattgaaaaggctgtatttggtgtgctctctaccctcttgcttctatcctgttgcataacttgaccaactggtgaaacaccagaagatggaagaagcaaggaatacattctcccttagagcctccagagagagcatgacgcttgcagcatcttggattttggttcangtggaactgaatttctgacttctggnccttcagaaatgtgaga

SEQ ID NO: 571 - DNA, 518 bp, homo sapiens
gatgaagaaataaagagagggtgaaatcattctgggaagtctccttgaaaggggtgagtcataaagagggggttgggtgcaggtgaggaggaggaagattacagactgcagggatgagcaaataccatttcccaggatttcctgaagtttttctcccctcccaaagcccaaatctgcctctttctggggcccagcgaggaccctggaagacagagatcctagaaaaagcagagggaaaagaagaggaagagaacatggggaaaccgccagggaacagaactcttggtccaggaggcgcaaaccacaagtgcaattagtcaaaaaaaaaccctgaaattaaaaaatgattccaagctgaggaggggagtacataagttactgcagccccaagacatttatgaataatacaaatgctgtgaggtgctgagcctgagcacagttaattaatatgtacaggagcagagatgcacttgaaaaacaatagtgctgtttccccctcgccagaagtaaaaatattt

SEQ ID NO: 572 - DNA, 233 bp, homo sapiens
gcgtgcctgggtcccactacagacctatgatgacatccgtcacagaaccaggaaagatgcagaaccaagaaagatgcagagccaggagggagcctacaggagcagagatgtctcagccttcctatctcccgctggatcctgcatctcagatcgtgtgtagattgaacagttgaggcctgccactaatctcttgaatccttattaaaaggtcaactttaaatgtgaaaaaaaag

SEQ ID NO: 573 - DNA, 520 bp, homo sapiens
  misc_feature (1)...(520): n = A,T,C or G
acacggggtctcactacgctgtcaagactggtctcaactctaggttcctgttaaggacatcaatgcaagtcttggaactcaaagatgccactgaaaaacttagtctgttagtcaaggcgagcttgtcctggattcacatttcgacaagagcaatctcagctacctgtaggaaggcttcataacccagaaagaggtgcctcccaacacctcagttaagactctggacactggggaagcctaggcaagggagaatagatgtgggtgggcctagcacagctacctgggtaccttcagtaaacacaggctcacccctgctatggctgggataggactgagagaagatcagcttcttcaggtggggggggctggccaagacccccacccactcccacctcccaacttacagatgtccctctacaggccattcccagccagctgacccatgatagctctgcttaccgncttcacaaaggataagctatcttcctgtccagcggtacaattctaggaggggaaagag

SEQ ID NO: 574 - DNA, 309 bp, homo sapiens
tcctgagctgacatgtaagaaatatgactgctctgctggaaagaccacatggagaagctctgagactaagggagagagagaggcactcagctgggtccagcctgcttgccacccccaccaagatgccagacatgtgggtaaagttgtcctgtaacatccagaccagcccagccctcaagtgaataccaccaggtgacactgatcaatcccatgtggagcagactttcccagcaagtcctgcctaatttcctgacccaaacaattgtgagatatgataaaaaaaaatggtcactgttttaaaaaaaaaaa

SEQ ID NO: 575 - DNA, 434 bp, homo sapiens
  misc_feature (1)...(434): n = A,T,C or G
atccacactggcgacnggctaancagtcaaggccaccctgcanntgnnnagaggctncctactttntgatgccttcgnancttcactcaggaccatcaaagatacaactcttagactttatgggggcaggaaatctcgacctcagaaacctcagagactttgagggtctcccaccatggaccatgtatcaagtggaactaaaattttcccttagggcagttccacacactctgaaggtccaacgtgtctgtcagttacctggtgggtctacccacctccctctntaaccctgccccagggttgaagtanagctgcacctgatttaaagttttcacagctaccctgagcacccacagacctcctgcaaggttgaagganatgaccttctgacttaatcatgtcactgtagtccttccacagtaaatagaggaatc

SEQ ID NO: 576 - DNA, 267 bp, homo sapiens
ctcccgacctcgatcaagcctcgaccctcaggaccgccagctgcttctccaactcccggtcccggtgtcgcccagccacctcctggctctgccgttctgcctgcagttccttaagctcctcctgtgtccggagcagctcctggaaggaaacgggaatggtgatggggcacccagagccagactaagatacctgaatgtggagaagctgaaactctcatacactgccaggggaataaaaactgatgtggccactttgaaaaaaaaaaa

SEQ ID NO: 577 - DNA, 274 bp, homo sapiens
aaagccaaaaagactagatgaggaaataccatcattgtgtggaatattctggattgggagtggagtgctcagctaccctgcaccagatcacttcaatattcccctctcttaatcgctaatgaaagaaacagcagctttgactgatgactcaacaataagtctgctggggccacactgaagcacaatacccaagggctcccgggagtgccatgcaaatcgggcacgtttccacactttgcaatggaagagaaatatggttcttttaagatctcca

SEQ ID NO: 578 - DNA, 202 bp, homo sapiens
  misc_feature (1)...(202): n = A,T,C or G
ggggtggacctcacgctacttncattcatggcggaaggngaaagggagctgccaggaagaaaaagcaaattgcaaaaggagagcctgtcatacccacttctttgagaaggctctctcccnaaatgtnnagattaaacaacaactaaagatggcgaatcatagaaggagacttgtgcactatctagaaatgaaatcaatactc

SEQ ID NO: 579 - DNA, 136 bp, homo sapiens
  misc_feature (1)...(136): n = A,T,C or G
ggaacccttgtcatccaggaatttcccanagagatggntntngcngaacaccntttctcaacaagaaaaatctgttggaagaaggtgccctgtgatctggcctattttgggaanactccatccatctttttgggaa

SEQ ID NO: 580 - DNA, 272 bp, homo sapiens
atgcatgagaagaagcacccccttttctcctgttctcctttgctgaatcaagtcatatcttcacatattgtctggaattgctacagctattttgaaacccaaagtgaaagcatcatcaacctgctgaggatagcaaggcagaaagacaaattcatcggtggacctggatctgtgatgacttcatcaaggctctgagccaatcgtggaccacctggcctccagacatcatcttatgtgaaatgatggctgtccttattgtgtaagctgggctg

SEQ ID NO: 581 - DNA, 242 bp, homo sapiens
tgatgttggagaggctgcaggtgaggaagtgaagcaggaagaggaaaaagatgaggaagatgaaatcatggttcctggtgggcagagatgccagcgtatacttagaccctccctcaagtgctcatccacagatgctgtccctcctgaccatgagacctgaagtgtctcagcagcgtcaccatgcttggttttattcatccacactcagctgaagtaaagagggggcctgcagagatctatag

SEQ ID NO: 582 - DNA, 267 bp, homo sapiens
  misc_feature (1)...(267): n = A,T,C or G
acttgtttgccatgtctcccactggaatatcntctgcatgagagcaggcactctagctgccttggctatgctggatccctacagattcccacagtgatcaggacccaggattatgtgagattgacatgaaataatttctgaaatagcacactttatgctgattactntatnnncaanttnnttgncananaagtagtnggataacactgacattatttttaaaaggcaatatgctttatgaaatgtatcttaataataaaagatcct

SEQ ID NO: 583 - DNA, 197 bp, homo sapiens
  misc_feature (1)...(197): n = A,T,C or G
tatctactactatcgtaatatcnctncttccttacttaggggggngggatcacntttctctttggaangccgtctgaggggggctacatgcttttaagtccagcaactgtagcataccatggnncaagtcaggaactcgnnaccattcatttgcggattcaaaccannatggggggtccagcggggtcttggccttt

SEQ ID NO: 584 - DNA, 137 bp, homo sapiens
  misc_feature (1)...(137): n = A,T,C or G
actctgctcaactaanaacattacacgggggggggtgggggtgagngactacctcttccatncaactcctattttccctatactagaanttaactacaccgtattactaaaattaatnacacctgtaaaaaaaaaaa

SEQ ID NO: 585 - DNA, 221 bp, homo sapiens
cagagcctgagaagcagagtggagagcgcccagtccacgaggacccggcccagaccgagatgctccaagtgcaccatacatgcaggtctcaaggactctgcacaacaagagcatgagacggctcacttttctactgactacgtgtccaggaagtcgtattttgggtatactgagttaactacacgtattactaaaattaatgacacctgtaaaaaaaaaaa

SEQ ID NO: 586 - DNA, 326 bp, homo sapiens
agacccatgttaaatctcctggtcagaagatcattccacccaaccctgaatggattaaagttgacagggcccaaccagggtagtggtccaggacactccatcagccattaagtaagtggatccatccatgagccaggcccaggcatcttcaggaacctcgtgtaccaaagcccccaggaagcccaagacgccaacatagaccggcatctggggtagccacatcggagtgtgactggccactttttcatgttgctgtggggcaccactaatgctcagtttacttctattgttttcagccacacattttgtagtaacctgttacaaaa

SEQ ID NO: 587 - DNA, 115 bp, homo sapiens
  misc_feature (1)...(115): n = A,T,C or G
ctttagggtggcttcatngngttgtaaggccggggggngngcctccnttntttaagcccttancatcccctacctnttctcctaccttctccntaccctaaaatataactcctcc

SEQ ID NO: 588 - DNA, 198 bp, homo sapiens
  misc_feature (1)...(198): n = A,T,C or G
cttctctcctacttctnctcccctttttctctcntctctttttccntttctagnttagggggngncgggganttttttaggncagagtttttgaagnctccttnttttaanaacccntttncactccccttcccttttttcnttccctcntntcttttctctccctctctttttcctttnttcttctttctcttctct

SEQ ID NO: 589 - DNA, 235 bp, homo sapiens
  misc_feature (1)...(235): n = A,T,C or G
ttcttcaaacatctttnatcnaacaaaacctccttcatcntcactcttacntcacattattttccttnantaatnctttcttcnactcactacattcctttcttctactcaatcncnttcccnntctaccttcttnccttttcttctattccacaacctccctttctttcanacacttcccctntcnannttcacctncccccntccantttacnttctacctttctttaccttc

SEQ ID NO: 590 - DNA, 390 bp, homo sapiens
  misc_feature (1)...(390): n = A,T,C or G
ccttttttttttaactttttccttntctcccttattttntcccttttttccttcttccttctcnatcnccaccccctttanaatccccccaatttttccctcnccctcccccattttttcccccttcncttttnancttctaccttcctccnttttttntatnanttcttattanntttcttttctcccttcaaaccaattttctcccctttttttttccacccccctctttttattaacccncctttttttttttttctttcccnacnaatcccccccccccnttcntatttattncccaccccncncnttctnttnctcttttccanatatntctcnattnttttncnnnccctatttncnttttctttttccccattttccccccct

SEQ ID NO: 591 - DNA, 543 bp, homo sapiens
  misc_feature (1)...(543): n = A,T,C or G
gtggggtctttcacttncattggaaccaccgaagaaaggatccacgctggcctgctgcagacagacagccccgccaacaaccagcaccaagcaccagccacgcaagaaaggccatcccaggccatcccaggccatccagccccagccaagccgaagccatgtgagtgacgccggcatgaccagcaggagcactgaggagctgagcccaaggatgatccgtcaggctaaggtgttctccccggctaggccacagcccccaggtactcaggcaaacgcaaatccagtcgctgctgtgacttggggtgaaggagcttaccccnaataatctgggtgggtctgatcaattcattgaaaagaagcaactccgnctgnggaccgtagcgccagctcctgtntgagtngccccggctgcctntgnggaaagcttgntctgcagtttgggactcgtcttaccagaccccaccatnncatnagccagtggcttnagtaaatctntttggatgctgnttgaaatctttcttttttaaaaaaaggggcccgggg

SEQ ID NO: 592 - DNA, 193 bp, homo sapiens
acaggctgcatggagattgtagcatgaatgcagatattggaaatttactggatgtatgatcagacaaaccaattgaagtggagaagagaaccaatcagccaaatcattacagaagctgcaccactgcctgaaatatcttgactgattctatataagttgaatttttgccgaataaattctgaaaataaaaaaa

SEQ ID NO: 593 - DNA, 159 bp, homo sapiens
cagaaacttttggatttggtggacatgaagatcattggtgaccaatgtggagagctccttcagtggaatggttaatcctgagccagatgacctgaattcaggaatgaacaggagatgaagacatggagaatcagaggaaggacttctcaaggatacagt

SEQ ID NO: 594 - DNA, 186 bp, homo sapiens
  misc_feature (1)...(186): n = A,T,C or G
gctccaggtcagcctggcagtgatgattntgggtacaccatattccaaaccaatgactgggacactgaggcctgcagaagaccccgttgtccctaccagcacctcggacaccagattggacctaggagccatctcccatgactgtacaagtgacaataaatcactcattcttcattcaaaaaaaaa

SEQ ID NO: 595 - DNA, 185 bp, homo sapiens
  misc_feature (1)...(185): n = A,T,C or G
atggcatactgccacgcctganagcggtctgatngtgccactccaaaggcaacagaaccntgattgacacctagtcaattgngttngatgaaatgaccatgaacggacgaatgattgtatttgaatcccagcttcacaaagaactnttctcatatagcttttctgactaaaagttgctgtttacc

SEQ ID NO: 596 - DNA, 206 bp, homo sapiens
gtgtaagtcttggagtttcctgtaggcttggagaggatttccttttggatggtgttcagatggagcagacatgttacttccttatctgctgctgttgttgaagagtggccagctgcatctttgggtttccaagatacagctgaacagccagagaagacctactctcctctaataataaagattgttctctctttcaaaaaaaaaaa

SEQ ID NO: 597 - DNA, 513 bp, homo sapiens
  misc_feature (1)...(513): n = A,T,C or G
cctcggatggaattgcactcaaggacatgtctgcgtcaaagcttttctccaagttcgtcttcagttgctatttctgaagccacatcacaccctgagaaactcctcccttttcctctaccctgcttctccccccgtctgtctccttcttgtcacttttagttggttttgcacgggaactctgaggccatcccagctgcccttgtctgcccgtgagaatccccttccacagcgcctcaagagcaggatggaagttccaagagtatgaattcatttcatgacatgtaccttttgcaacataccccgtgtccactggagcaagaaggggaggctctcacctctttgctttctgttatgtcttccatcgtccatagggcagtgaccctcatggcttggccacaagaaaagcaggcatcttctctaaactatggaagaaatcatgaggtggggcccccagtcttttggtatgggagatgccaaacaaacaggaaataaagacncaattgcactccttaa

SEQ ID NO: 598 - DNA, 437 bp, homo sapiens
tttccacaggtggagtgataactctaatgaggtccacgtcatcatgactcctgtttagagaaataaaatgtttagatctcaactttcctgccattccctagtggtgttataaataagggtgacattgacgcatttcaaattgttcctcgaagagcggcaattcattatcttttaaagaaatttgctccacatcaagtctcaatccaactgacattagcgtgtgttagatacacatacgaatgtatctaacttccattgaaatggaatataagtcctgcagccactttgcaacctgaggatgtatagaacgcctatatgcgataccgtctatatgtgcatatatttgtgtatgcttgagcataaatataaaatatttacaccttatctgtctacagaagattaatttacaaaataaaaagtttccaaatcaaaaaaaa

SEQ ID NO: 599 - DNA, 412 bp, homo sapiens
  misc_feature (1)...(412): n = A,T,C or G
gaaaaaatacggcgcagaagaaaagcgagcattttggtgtcatacagacctcctactccatgatcatgatgaacaagtgaatcacttcagttctccaagctccactttcaccaaatgtaaaagaagaaaaccattcctacttcgagagtttgtgtggattaaatgagataatgggtacacagatgacacattatattcaaaatggtaacttcccttctaccacttcacaataactcacatgctgtaggcattccaacgcccactctcataagcaaacttcaagtctttttcaaggtattacttcataaagccagacatgttttctgccttgttcacagaagattctcactgcctaaaacagtgtccaccacacactgatcaataaatatctctntgcagccacaagaaaagg

SEQ ID NO: 600 - DNA, 515 bp, homo sapiens
  misc_feature (1)...(515): n = A,T,C or G
ctatgaatccacactttgtgaagatgcttatggcncactagacaatttgttaaatgactgcagttccttcaaaagaaatacagaattatggggagattcctgagatgtcagtcagttatgaaaaggaagtcacagcagagggtgtggagaggccagaaattgtctcaacttggtcttcggcaggcatttcctggaggagtgaagcatgtcgggagaactgtgagatgcctgactgggagcaaagtgctgaaagcttacaacctgttcaagaggacatggctttaaatgaagtcttgcagaaattaaaacatactaacagaaagcaggaagtgcgaatccaagaactccagtgtagtaacctgtatttagagaagagggttaaagaactacagatgaagattaccaaacagcaagngttcattgatgtcatcaataagctaaaggagaatgttgaagaattaattgaagacaaataccaaatatcctanagaagaatgatccttaaaagacattgg

SEQ ID NO: 601 - DNA, 547 bp, homo sapiens
  misc_feature (1)...(547): n = A,T,C or G
aatggaatcaatggtctggaagagcacaggagggtaatgtttcccagaagagatgatgttagaaaaaaatgtgctgcccctgcagcttttgatgcactttcttattggtctacaggttgttttctttcttgactgtgatctggaaatgtacaaccagaggatctcaataaatgctccaatgtgtgaccagctaattttattaacatcagttctctatgaaatgatgctgcatttactcggtaacagaatgaagtggcataaatgagaggcggtggacactaacctgtgactgagagagaggagctaccaccgatgaagactggtcatttgggtttcacatttctctgtgaatgaacagttttgaaaaactaagcctcgtgtatctattctcctttaaaagtactgccttcctaaggaaaacaccctcaatgnatccatttttgttcaagtctttgnctggagctggtgctacaactgctttaatgagagacaatttttttttntgtcatncacagtgncttttgcanccctcttttgaattaataaa

SEQ ID NO: 602 - DNA, 356 bp, homo sapiens
  misc_feature (1)...(356): n = A,T,C or G
taagcagtacaatcaatggatctttgatggctgagacaggttgaaatggcaaaaagacaacagcaccacttttgaaaacgactttatgtagnccacctccctggcctcagcgtcctcatctgaacaagaagggaacttcccagttctgacggtctatcgtacagcatctcagcgttgtgattcttaaataagtattcactgtacaatcctgtaaaggtaagagctaaacaatcagatatcacccccagaacattcttcggaagtctctgtgctctgctttcttactaatataataatagcttgttttcttatgattttcctccttcgaataaaaacaattcctattaaaaaaaaaa

SEQ ID NO: 603 - DNA, 215 bp, homo sapiens
  misc_feature (1)...(215): n = A,T,C or G
gttgtgatttttgtcctcatggctcaaaatgacagctacaggtgcagccatctcatctccatcccaggcaccaggatgaaggtatagattaaaaaaagggcagaggatacacatcaactgtcatttaaggaagagtcctagaagcagccccatggngctgcctcatgtatctcattggtgaagactgagtcacatggctacatcttgctgcaaga

SEQ ID NO: 604 - DNA, 564 bp, homo sapiens
  misc_feature (1)...(564): n = A,T,C or G
atattattgtatgtggatcttctccgtgtgctcctctggatcccggctctcctcactctgtgcaggaggctgactttcatggactgtggtattcaggcatccttgcctttcggctgcaggagaccagaggctgagagcagagagagactccagccttgaggggcctcaacttggccatggccctgctccttccaacagcattctggatcatccacatcaaacagaatcgaaagcaaaggatgcagccaagcagacgccacctggaacccattccagtgagggcagcagtagccaccacactcaagttccacaagagccagggctaatcttctggggccagctgggatctggagcagggagagcacttaggttgtcactgactgcagtgtcagaacctgcaagtgaagggttaggtgctctccctggacttggcaagttcttgcaaagngatttttgnagggggtctttactggggggcctncaagccagncctctggccctntaaaaaattctgaaggttctcaaaatccntttaataaancttaantcacctaaaaaaaaaaa

SEQ ID NO: 605 - DNA, 365 bp, homo sapiens
  misc_feature (1)...(365): n = A,T,C or G
accagtaggcgaggatgccgctgtggtgctacctgaaactccagaggacagacctgatgttccggtctctgtgggaggaggagtggtgtgctggggtcanacagcatctgctccaagtaggagacaggcaactgcnccanttnctcccntcttnaaccgtcccagcagcagagagtgtccactgcagacagcaacgcacccttctctacctccaccttagggaggggtcctgcctcaggaaggaatgccaggtgcagagaggcatactccgacggtgacttcaacttgtgccaaagttaaacncattaaagtggcctccngaggtaattgccctcacaaaaanaaatggaattactttctctgtt

SEQ ID NO: 606 - DNA, 266 bp, homo sapiens
ataaataggaaaccctgccatgttgaaaggaatacaacccaacatggagtagaaacaagaaatcaagatatacactctaggacaaggagcaataagaatttgacttaaaatggttatttagcatgtattagagttgcaactggattttatgtagttatgagggaaccctgaaaaaagtaccattgaacagaaatgagatttggtttcagaacttcagcccaaatgctattaaatcttttgcatttcttgaactattaaaaaaaaaa

SEQ ID NO: 607 - DNA, 344 bp, homo sapiens
  misc_feature (1)...(344): n = A,T,C or G
gcacttgcacaccactgtcgctggagcagntatgaattggnacaaccttatctggacagaaatgctttcatatgcataaagaaccttgaagattgcttctgagcctctgaactgtcttctgtgttctggaattcacattaaggaaacacactccaggacactgaaagcaaggnggcagtaaagaatgcggactctggggtcattatgactggggctntctctcactcctcatgngacctcanagaanctactcaacttnctnctctcagtctcctctcttgtaagatggggataatactaacatccaccacggaggtgttacnaaggataatacaacttcttta

SEQ ID NO: 608 - DNA, 116 bp, homo sapiens
ctcaactgggcagttctcaattgtggtctctcctgtggaagtatgccatgaaaagaaagtgaaagttgtaagactcttgatgcaaatggcaacatgtgcacacccaaaaaaaaaaa

SEQ ID NO: 609 - DNA, 348 bp, homo sapiens
  misc_feature (1)...(348): n = A,T,C or G
gggacgtcagccaactttttgggcatatccggcgacgtgacnccttaaagggggggggggggccattggtnnnaggncncancaaaggaaccantcatggcacaattggngtggccaatacccagtccccgggaccaaactgggtcanccgncttanccattgggagtgaagatggactatgntgataagagaagatctggaatacatctgaaagtgtccttagttgtaaggcttaaaagaatcagttatggaccttncagctggtggccccaagattatagtcccttttgatggatangaatccctattaaaagggaatacttagctggtttatttaaaaaaaaaaa

SEQ ID NO: 610 - DNA, 104 bp, homo sapiens
  misc_feature (1)...(104): n = A,T,C or G
ctactttgtttaacgagaagggccngatgaatcccctaaaactgtatttngataactnnattgcccatgaaaatngnttncctctggatctattactttgaata

SEQ ID NO: 611 - DNA, 354 bp, homo sapiens
cattcccttcacatggccgcccaccatgctgaactgatggattattgcaagtcctggtcctggtttggttgccgcgtccacagctccttgtgcattcttcccaaagactccattccgaccagctaccatccactatacaaaggtgaaccattacaccatcagggcttcccaccattggctggaaggggctggttgcacagacgactcctcttttggatgccttttccacaggtgacactgcaggctctccatgcagaccactgggaaaatccaccatgaactgcaaataaaacattgtactttgtctaagcttttgcaaataaaacattgtaaaggagatttcaaaaaaaaaaa

SEQ ID NO: 612 - DNA, 634 bp, homo sapiens
  misc_feature (1)...(634): n = A,T,C or G
aaaaccttgggaaggggacttggggcnaccgggaaatggnaaaaatgggtnggnaantgggggncttgggggaaaaccntncaaaagggcccaaggnctcccaccaagggtnggggggaattccaatttaaaaggggggggaaccgggggtgggttncttnttgggcctttatttgggttttgggtcccccaaaagggcccttggggttcccttcnaaaaaaaccttgggggcccccttgggnaaaattccaaaaatnggccnttttncccaaaccccttcnaagcctttggcccccaaggaaaggggaaaaanccccgggggggaaattttaaccnaggggcccctttggaaagcccccaactttgggcaaangcccccnaggncccaagggtntnggggttaatttttttaaaatgggtaaaaaaattttcttttaaagttaaaaaacaaaaccttcaangggaagccttcttcttttgggtccccttttttttaaaaaaaaatcccaattttttcanaaacntttttcnggctntaaaaatccggggaaagggggttntttnttttccangggggccaaaaccnttgggaaaattcnttggnggcntccctnggggaaaatggccaaaatt

SEQ ID NO: 613 - DNA, 519 bp, homo sapiens
  misc_feature (1)...(519): n = A,T,C or G
cactggataaatacagaacaagataacaagagttcccagcaaaggatccagcttgaaataacacggtgctaagcatggatttttccaccgaatgaggaaattctaattctaattgttagtctctttatcaatgacgccaagtggcaaggaacatcaccatctttggagacctagtggtggagttaaactactacagggaaacaactttacgtatagaggagttgagcttcctagaggaaaagaaggaaaatcattcctaatggaagatcaactattcaagaaagaaagaagagcaatgagaaaggtagtctaattattcagaggactgtgtgatatttgtgacattgccagatggagcacgttcaaggagaaagacaactatgcagccacaagaaacccacactatcaccttgtgcttgaggaaatggtgttttatcatcacgttgttaatcgattgacaatacaattacttcagttcatttatgcnggaataaatgtaattacccgataaaaaaaaaa

SEQ ID NO: 614 - DNA, 404 bp, homo sapiens
agaactgagaggtgttcttttccgggccaccttaccctcccgcactccccagttctacctttccaaggcaggggaaggtgcatcctcgccaggctcctgcccgcgccttccgagtacccctggcccgcagccggtgacacggcgcgcggaacatccgtgaacgagttgggttacatctctgtccccgcgaagctgcagatcgctgaccgccccgcgcacccccgcctgcctgcacactgtcaaccgcacttaggggaaatttttggaacagaagctccgcccatcctgctcccactgcctccactaaccgactcaaaacccccacctcgggccgccgaagcaggtttcgtcacacgatctgggggactgtattttttacaagaaaacaagcatcaaaaaaaaaa

SEQ ID NO: 615 - DNA, 515 bp, homo sapiens
  misc_feature (1)...(515): n = A,T,C or G
gaaaactttggaaagaaaacaangttttttttggccccaccanttttggccccccaaggggaaattggggccccttttggaaaaacnttcnttnggggggcccttccaaaaagntnggaaacccccaaccnttggcccnttttggggccccccccccttaaaaaaccttggccttggggaaaaatttaaccaaggggggntccttcaacnttcggcccggaaagggtttggggaaagttggcnaagtggggcnacccggggggccccttaagccccttggaataaaattggccttttcttaaaataattttttttttttttttttaaaaaacttggaaaaaaaattncccttttaaaggggggaaaaaaaaccccaaccttgggaagccttcttccccttgggggtgggaaaaaattaaagnaacttttccttaaccttttgggaacctttttggcccccaaagggaatgggaaccaaccaaggnaaaaaaaggcctttgggaaaaaaaaccaaa

SEQ ID NO: 616 - DNA, 329 bp, homo sapiens
  misc_feature (1)...(329): n = A,T,C or G
gaaaaccttgggaaagaaattggaagccnacccccnttggcccccaggggaaacttnggcccccncccccggggcccccttnggcttttttttttntggaacctttaaagaantcnttnggaatanccccgaaaacccaagaaanccaanggtttttaaaanngggcctttggtttctttaaaaggtgggggaacnaaangggcttctttcnacaangggaaccccggantngccaaagaaacttnccntggnaaaaaaccaaggaacttaaccttctnttttggccctntntttttggcttggcaangtttggggaagaaaagaaaaa

SEQ ID NO: 617 - DNA, 451 bp, homo sapiens
  misc_feature (1)...(451): n = A,T,C or G
tgcagagaaccaacattagcnattggcagcaatctcctgtgtggntgnagcctagcaantaacaaggagcttccctacacattgtatcacaatgaccttgccaggtctntcctgcctactgccggccctacccacaagatgtgaacttcagagccttcttncaactgcttcttggctatttgcaccctctaaccctctggaagaagaatgaggactattatgaaggcaaaagcataaaaggggaaaagattagcctccagagtaggaagattgggttgttggaagccagcacaagccttcccctgaaagagttaattcgcctccaatggacgtagggactgacctgggagtggcctcagcctacataggacaggcctaaaggccccattggggctgaaggtgacactgggtcagatccctaggattctgcaacttgaggtgggagtgtcta

SEQ ID NO: 618 - DNA, 285 bp, homo sapiens
  misc_feature (1)...(285): n = A,T,C or G
gtctccatttgtctcccannctgaagtgcnnngatccaccccactgtnatctcaaactcctgggctcaancaacgttcctaccancctcccaaagcactgggattatnggcatgagctacctgatgcctatantcaggactggnctganccttttaatcattatgtccctttctgtcccangtttttacanttaactggnaattatattggactttggacttnttntanatcaagtagaaaatgannganggctttttgctgtntgctaattctgacttaggctt

SEQ ID NO: 619 - DNA, 512 bp, homo sapiens
  misc_feature (1)...(512): n = A,T,C or G
gatcacttaagaaaaagaagccttgtgctattaaagaagaataaggaggaggaagaggaggagacggaagagaggagaagagaggagcaggggaaaagcatacggacagaagaacacacanaagactgagagttgattctgatggcattttctttcttaggtagttttttctaagctccagactcattatcatccttgttttctacaagccacactaatatcatcttaataaattattttattttttgctgaaaaacatcttgagtccttttctgtaacttgtgatgaattaattcctaaataacgtaggtcacatgtgctaataactattgttgtatttgttgtgcacttcaggcagtttacataaatgatggaatattaggtctgaacatttattcaagccaaccatctgggacaatcagtaccctagtcagacatacccacttcaggagtgttcatctattaatgaatcacaaaggccactcttggggagataactgcaagtctttcag

SEQ ID NO: 620 - DNA, 521 bp, homo sapiens
  misc_feature (1)...(521): n = A,T,C or G
gaggcagggatgcagaactatttcttctccacttctgatgttttcttcatcttggagggagcccaatcagaataacacacctggcctttctccaccccttattcactccactccagggaaaatggagtggcttagactcgtgtatttgggagccttactttgggagagacctgcccacagagaatacaccttcccctctgcacccacccccatacctgaatcttacaggagcagctgccactcactccaccacatgagagcatccacactcatcccacagtgcccatgacatgctatagaaacaggaaagaaaaatcacggggacccatgagtaagctaagaagtcatggaaacggtaagacaaccaaaaggacaaggtggcactgctggcctcactgacaatcagatggaagatgagcttggtgagccagccctggcaggcatgtggacccagtaaccaagtagatggaacattttgccaggtgtttcacagtgatngattaactgaatgtcttggtttt

SEQ ID NO: 621 - DNA, 282 bp, homo sapiens
agtctcagatccatttgagcaggtcctgtctctgaagtccagggctctgcctccagctcctaggaaagtacccggcacaaagaagaggctccataactattttttaattgcattgaaatgaagatttgggatttgcttgaatggagtcagcaaatgccatcatcagaggatgctatttcagaagagaaaaatagaaaggaggtgtgctcctaagggctcctgccttggagagtaactcacaaggccagcccagattcaagatggaaaggggggggaaaggaa

SEQ ID NO: 622 - DNA, 529 bp, homo sapiens
  misc_feature (1)...(529): n = A,T,C or G
gactcaaaccccaggatcaagcactaagaaaacagccagagagagacttttccaatcacctcccacaactggagtgaagaatcangatacagtggacaaaataagacatgaagtgtnaggatgttgtttcangctgcacacgtgtcccagagaagaagaaaccaagcatcgtgatanaactctgttgagccaggcaaagtatgaatgggntgatcttcctncatnatggaaagaaacttatactgattcatcaagaagcagggatagaagcctgnttatattgtnatttattttagagactataaaagtgactaaccaaaagaaccaaaacagggatggttgggaaaaacgtggttatctttgggcagtgaggccaccttgactggaagactgcccaagagtgaaggtgacaaaggancctanatcaggagaccaagannagaggacnatccagatccaacaatatcgctagagtcccttggtcaagctgaatatggaaatgancttttccctatgtaagcccaataaa

SEQ ID NO: 623 - DNA, 225 bp, homo sapiens
ggtgccccagaccatcatcatgaccttgctatgacccagcaacctgcctgataacacaggtaccaggtttttgaatccctcagcaactgaagcaaacagccaaagccacacgcatccagcagaaaccatccccccagttctatggaagacttgcgtccttggtataagaaaacaatcttttctgagattttaagaaatatatttaatcatgtgtaaaaaaaaaaa

SEQ ID NO: 624 - DNA, 192 bp, homo sapiens
gtttcccacctccactgcttaaggtttaacttaacaactgaccttcgactgtaaaatgaagcaaagtatctgcactcaagtagtgaaaacctaagaagtactattctgcgcaacttccacaagagggcagtagaaccctctgaagtagtccacaaaaataacagaccttgatttttcctctaaaaaaaaaaa

SEQ ID NO: 625 - DNA, 485 bp, homo sapiens
cttttctcggagttgaaagtgataacacaccaccacacggtcaagtgaatcataacctgctggggcttgaggtatggaagacgaacagtggaggaaaaggtatcttccagcctggtgaaatgccgtggaaatgtgaggccatttattttttctaaatgccccagcaacagctctcattcacttgcagaagcaagagctgttctgactactcacagtatatggtgagatctttatttctttgcctttttttttactgtgagtttccttttttgtcatcattgaccttataatgaatcactgcactgagtaatgaggctgcagtagataaggtctcctgagaatatgaaggaagaagtatgttcagcaactgattactgacttatccacctgattatagtgaccaatctactcatatatctgatttcaaatgcccaatacaatgttaataatcttattaaaacttctttgcagtaaaaatcaaaaaa

SEQ ID NO: 626 - DNA, 306 bp, homo sapiens
gtagatactatccccattttatatgaggacactgaggctcagagaggtcaaataatctgctgtcagcactcttgcctggtaaaagtggcatttgcagcccaagtcccagctctaaccctccatattcaaacgtgcggttccaggacccgagcatcagcaccagaccctgccccactcgcaccttctgaatcagagcctgaattttctcaagatccccagatgatgcatatgttccttcagctttgagaaatggctctaaaccatgctataaagaataaaacctccgagaaaatgcaaaaaaaaaaa

SEQ ID NO: 627 - DNA, 182 bp, homo sapiens
tgtgctgcgattattttcataccatcactagtctcctatttctgacctcaaggaaactgctattcttaaaaagaaatatcttcagtgatggagtctcttactcaaaaccatattcctaaacccctactaccagaacacaacgtacaaataaaaaacagtaccatccagtacaaatataaaaa

SEQ ID NO: 628 - DNA, 315 bp, homo sapiens
gattatattgaacactcaaggatgtcagcctaacataaaagtgaagatccgcagaataacgaaacagagagaaggaggcattggaataggcttgcatgctgaagggaatgattcatttgaagggagaaacaagtgcagactgaaagacagcaattgctgaagcaatatacacaagtaagctggaaaggatgcaatctaacgcagtggagaagggttggcttccgctgaagagttcatctgtgataagaggagagagaacgaagcatgtgcttagcaataaaggttacatatatttgggatttgtaaaaaaaaaaa

SEQ ID NO: 629 - DNA, 132 bp, homo sapiens
  misc_feature (1)...(132): n = A,T,C or G
gctgctctggatgggntgagagatgcaatttctctccctgnccttncttncaanctgantnaaacctgaaccctgcttnngtctnaaatgctgngtnatcangctttctctcccacgacaaggcctctgaat

SEQ ID NO: 630 - DNA, 141 bp, homo sapiens
tcagaaactgaggtcacgatcaagcaaaaacttcctatttgcaaggagaggctgccttagcctcgagaggaggacatgtaaattactgaccttgaagacactgcactaccctgcggcactgcagacctttaaaaaaaaaaa

SEQ ID NO: 631 - DNA, 332 bp, homo sapiens
  misc_feature (1)...(332): n = A,T,C or G
tggatggaaacgcaggacccaatcaaaggctctatggctttggataacacagcaactagacagaaggaaacttggtacctgaatggctgtgtggagcaatctctctcactcccctgcccacctctattggactgtgatacaagattggactgtgaacaagaaataaacattatgatgtttaatcctaagatttgagatttgtttattagagcaatcaggctactctgttgtaaattgattgcaaaatttcctccaattatttctcttccatacaatgtgatttagcagtttcttccatcaagtggngggggttattttccatttcctggaga

SEQ ID NO: 632 - DNA, 172 bp, homo sapiens
gtgatgtaaaagatgacatgagtctaggagatgctgaagccatcaatgtgaaagaagcctgaatcactgagtcaccatgtggaagagaggcaaaaacaagcctagaataccatcctgaactgttaagtgagcaagaaataaatcctcttgtttttagtgattaaaaaaaaaa

SEQ ID NO: 633 - DNA, 259 bp, homo sapiens
ttggatctgctgacctcacatctgaaggacaactctgtatctgcttcagtgatcaaaagcagtccacattttaccctcaatgccatggctggaaaattccctgtagaagccaatcaaatgaagacactctaattttttttccccttcatttctggttagtcttcatttaatgagaactcttatcattcaagtcaaaaatgaaatttatttaattcagtggaaatacattaaaaacaggaaaaagctttaaaaaaaaaaa

SEQ ID NO: 634 - DNA, 171 bp, homo sapiens
  misc_feature (1)...(171): n = A,T,C or G
gggcccatggtggtttcaaatttntgggaccaaaaatccaaccaaaacccnccagtanagtggaaagccaaaangggaaaaaagccctnggggccctggnaaaaaccctnggggcttttcccntttncttggncatnaacacaaaagcntattttcaagccaagccccaaa

SEQ ID NO: 635 - DNA, 114 bp, homo sapiens
  misc_feature (1)...(114): n = A,T,C or G
actggagcagaccttattatcacttgaantccacntggaggatactgaaaanactnaaatttttgatgtgncatccaagttcngtgtttatantggttcacctgtttgaagggg

SEQ ID NO: 636 - DNA, 343 bp, homo sapiens
gaaaattaaggcctgcaaagattgagtgaaaatttcagtgtcccactgctcatatgcctgaagttcattcgaatacaagcaatctggatccagagcccttgctgttaagcatgacatagactttttccagaaacttttgatgttttctcctacatagctcctttctgcattctggtcagtgtttcactttttagtcagttgccttacaagactcatgccatggacacaatctccacttgaggacattaactttactcttttatcatcacttggccaggcaagtgtacttaggaaaaagcatctaggcttgagaataaaaattttaatattgcaaaaaaaaaaa

SEQ ID NO: 637 - DNA, 175 bp, homo sapiens
tgactgtcttgacttttggatcagaaaacttcatcctggaacctccccattactctgaaataaagaacattttcatcagaacttgggaagtgcagcatctagccaagatctccaaacaaacaccattttctgattgaaagaaataaagcaaatgcttcccagagcaaaaaaaaaa

SEQ ID NO: 638 - DNA, 240 bp, homo sapiens
  misc_feature (1)...(240): n = A,T,C or G
ctttatacattggcactntnggntattgaagcgggatgtggnganctctctctgccagctatctggcagacaacttgggtgtgctgacgcgaatgncatcacttntatcannggagggggactantcanganaagcccacaanagattcatatgcacattaaagnngggagaagtcccatactcatatactancataaacagagtatcctnaaactcataacaaagaaacctacaaaaca

SEQ ID NO: 639 - DNA, 315 bp, homo sapiens
  misc_feature (1)...(315): n = A,T,C or G
ggaagctgtttttccctctttggggtctcagagagattggtggcaaggactcctgggaagagaaaagctgaaggacactctggcaagaggaaaccccgagccaaacgtatggccacctctgaccactcgaccagcccagcatggtgtacgtttctgggtagcntatcacgccttccaagcattgcctttatcttccttctccccatcaagcctgtattgttttccttttgaatcataagcacttttgttaaatacctcaaatctttcgagaacagcaaggagcaaaataaacttaacttctctgaaaaaaaaaaa

SEQ ID NO: 640 - DNA, 248 bp, homo sapiens
atcctcaaagggtgcctgcattatcttccccaacccaggactgaccccgaggctccaaatcacctgccttcctccaagcaaacttccgtctcccagctgacctcggctaggcatacggagcaatacactaacacaccatcgctaagcctccctttcaactcttctaagtttttggatttttcaaagagaaaacatgttatcttcccctacccttactccccaaaggaacttaaggcaaaaaaagaaaa

SEQ ID NO: 641 - DNA, 185 bp, homo sapiens
  misc_feature (1)...(185): n = A,T,C or G
ggaccttcccttggccnttttaggtcaggnaaaattgggggggggaaacttgtgttaggggcgggccntnttttttaggnagccccaanaccccaaatggtngaaagggcttttggnganaaaaggnnnccnctnnaaaaaccacccanaaaggaaatttgttngaggattttttaaaaaaacaa

SEQ ID NO: 642 - DNA, 133 bp, homo sapiens
  misc_feature (1)...(133): n = A,T,C or G
ccaccccaatgcggcggccctttccangataatgtatnacaaccttccaagcatctngctttaaggttgccttgtgcaaangaanncatgganccgcntgccttttgaaccatatgaacttttagctgatacc

SEQ ID NO: 643 - DNA, 113 bp, homo sapiens
  misc_feature (1)...(113): n = A,T,C or G
tatctccctttgtgtntcttggggattaacctgatgttactctganaaggctctgtatgttgccnagttttgaactctactgacccggaaccanatattttagtctaagacca

SEQ ID NO: 644 - DNA, 108 bp, homo sapiens
ctgcataatatttcattgtatggataaactacacagttcccagtgatgaagaccaagattgttcccaatctgtttgctattataaacagtgttgcaacacaaaaaaaa

SEQ ID NO: 645 - DNA, 272 bp, homo sapiens
  misc_feature (1)...(272): n = A,T,C or G
acttcttaaagctaatttccaactcttcctgcctgcaatgaagagcaagaagtgattaaactgttcaattgcacaatcaactgacaaacaacaatctacatgacaccttcaagaaagggattaatctccacatggcacaaagataccatcaagggatacnacatacatgaagntgncacatctctttaagctcatcttaacagccactattcctcaaaactttctttggctttgatgaccttttcagtttttgagaagtatttgggggggtt

SEQ ID NO: 646 - DNA, 292 bp, homo sapiens
ttatatccgaaattcctgaagaatccaaagggcgtgcctcttagcccatgtcagctagacaataatacttctaagacttctacagcagcctcatggggagcccacaataaagaagggctgatctcaaacagcctgagcctggtgtcctaatggaatgagagtctggaggaatcttggaaaaaggtgtgtgttttgcatgtgagaaaaaggcaaattatttgtgactgaagaacagatcattgcagctttaaaaacgtaagccctttttgttggtgagaagtatttggggggg

SEQ ID NO: 647 - DNA, 431 bp, homo sapiens
ttggaattctaaggggacagggaaagaatgggtttgggcggaacggtgggcccggggggccccaaggccttaatggccttcccaacccgcccaaagtgggccttggaaacaatctggggcccttggaatttcttgggggccattccttcaatggaaccaattcttggcttcaatccggtcaatccccaagtggcttggaatctttccaaggcctaatgggataagaatcaagggaaggcatcaacttggaggccaggggaagctcttgcccatggaccttggtatcccacgtactccaaactttccatttcctcgcccttgcccccgggaagcccgaagtccttgtattcaagccctttatcctcacaccgcttttctacaaatgggcattcaaataaaaagtgcaccgtgtttcttggtaaaaaaaaaaa

SEQ ID NO: 648 - DNA, 191 bp, homo sapiens
  misc_feature (1)...(191): n = A,T,C or G
cctgtgccccaggcccnaaattattntactttaanancccntgtananaacttagcatgaggncaacagcntatgtnataaatttattgaaaacgttatttganttattgatcaaaaaggttatatgtgacgggcgaacttgctttccttggtgctcngtngggttaaaagntctttgtttttctaaaaaa

SEQ ID NO: 649 - DNA, 516 bp, homo sapiens
  misc_feature (1)...(516): n = A,T,C or G
aacttcccacatacaccccttttggctgagctgtatggccataagcgtagagacttgcagctgtatgtggccgtgaatgagagacccagagatggaagcttcacagcatttgtggcagtagcggcagaaatgcatcacacatttgagtccctagatggccttgtggagaaatgtctacctgccaccctggactattaggaagaaatattcttcaaacaaaaccttatgaggaacagaaccatagctcctgaaactgtgtgaaagcaagagaaagagagtcttttgtcaatagtctgtccacacatatccagacccaacccaaagttacaacctgacctccacgatcactttccctcacagggaccgcactatgaggaacacgccaaagttgagaaaggcctaagatcacctgtgccctagagaggtgtacctacttcgcctggngactgnggaccagctctgcaggaagcaatttaccaaatgtctctgcgatncagtgggcagcaattacacctt

SEQ ID NO: 650 - DNA, 394 bp, homo sapiens
gtggggtctttcacctgcaaccctgcaagaccgtctgaggaaactgaaactcatcttaagatgatccaccgggaaaagaatggggggaagcattcatccacaagatcaaagtccctggaaatctttgaaaccagcatctcaggaagaaacaaatcacagggcactggtgttaagagaatgctgactgtctggttttgatggggtggtaatgtggggcaggaccactcattctggcctggaacccccttcctgcctcactgtattccaagtgttagcggcctctgcaaagatcttaaaccctattgttcatacctctgaatctcctacagcgtctagcagagctgcagtacaaagtacacactcaataaatatttgatgaatggaaaaaaaaaaa

SEQ ID NO: 651 - DNA, 126 bp, homo sapiens
aaagatcaactagcaacgatttacagacaaaaccaccttggtaaaaataccaaaatgtgggagtaatcctgagtcacttgcattatctacagaactgaataaaaatctgcattggaaaaaaaaaaa

SEQ ID NO: 652 - DNA, 229 bp, homo sapiens
aaaggtgcagccaggaaaactcattccccaggagataatggatgtcagcccagacctccacgtccatgcaaaaccctttggtctctcagcagaataaagcagcctcggtccaaccataacctgaccatggtgaggagaggcaaaaggcagatgaaacccactatgcctcagcctgggctccaaacacatttttgtttgaagataaaagctacttagagcaaaaaaaaaa

SEQ ID NO: 653 - DNA, 332 bp, homo sapiens
  misc_feature (1)...(332): n = A,T,C or G
gtaaatgaaacacacaagaaatcatctatgatttatgaacacatagagacagcacaacgtaaagacagactggaagactatgacccaaattcaagatcaagggctgcctggagggaaggaggaaggtccacagtgagtggctaccaagagggattttggctgcagctaaaatgttttacttcttttatgtgagagaatcatgcaaatatgagaaattatcaacctctgttaattctggtggatggttttatattctctgcatttttaattattgaaaagggcatgagtcccaaagcaaatacnattaaaatttccccttggctaaaaaaaaa

SEQ ID NO: 654 - DNA, 340 bp, homo sapiens
ttctgtctagaaactcaagtagaacaattcagtagaagtggtgatgccaggcttcttttctcatgactgatctcaagaccctccatccagaaaaggaatggctgcagtaagtggcgactacccgcgtagcacattctccttccaagaacattactgcaagatgcaccaggcgaagcctcagccagagccctaaaatgagctccctccctcgccagggggttcaggcactcccaggacaactcccactctgtggcagatggttggttcccattgcatcaacaaacaaggaaaccaagctgaaagaagaggcacaagttgtttcatctgagactaaaaaaaa

SEQ ID NO: 655 - DNA, 108 bp, homo sapiens
  misc_feature (1)...(108): n = A,T,C or G
gcagaactcaaaagcttgatggacaatgctncttcatcctttgaatttgctaaagaactcatcaggcacaatctggttgttttccgaggaggtgaaggggctttgcag

SEQ ID NO: 656 - DNA, 355 bp, homo sapiens
  misc_feature (1)...(355): n = A,T,C or G
gtggtactgtgaaggcaaggagcttgaaaattccccagatattcacatcgtccaggcaggaaatctgcactcactgaccattgcggaagcctttgaagaggacacaggacgctattcctgctttgcttctnacatctatgggacagattcgacttctgctgagatttatatagaaggggtttcttcttctgactcagaaggcgaccctaacaaggaagagatgaatcggtaattctgattttctgtcttatagctttagcatcctcagatcaattaatagctcaaagagaatgattaattggttactagaacttaagaagggtggctccagggtttgaccacaaaaataaataaa

SEQ ID NO: 657 - DNA, 414 bp, homo sapiens
  misc_feature (1)...(414): n = A,T,C or G
atggcaggtgagaagagaggagaagtggaacttagaattgacaacatcctaggattttactgacatttcagaaactctggagagaacagtttggatcaccaagagtcataaaagtcccagatacccattttcctcgttgtcttctgctgttgactcaagttttgaagtacttataattagngaatatagctcactcagccatttaaatggaaatttgtcataaatgcatcaaattgacattaactgtgatcgttccgtcaattatttgccattccaaaccctcttcatcattgttgctgaaaataatcaaaagttggctagacacacacgatggcaatgtttgtaccgatgaggatgcacatagcctacttcctgctccagtctggcaggatatccttaagagacatctgaaac

SEQ ID NO: 658 - DNA, 130 bp, homo sapiens
  misc_feature (1)...(130): n = A,T,C or G
ttctgggcctgacccntatggcccctgccatgctggcctgangaanagggtcgaaggaggatgctnaagccgtacggaatggggtagccattgtacagacaaatgcggtnccanaacttctgttttatac

SEQ ID NO: 659 - DNA, 384 bp, homo sapiens
  misc_feature (1)...(384): n = A,T,C or G
gcatcctcatgcagtgtgcaaactcanctgtgcaaggaacacaaaagcatccanagatnaacaagacacaggccctgcttgtcaagacctcatcatctgaaccggngaancaacaganagggggtctcactgngttgcccanantgagaccttnnactnntnacctcnggnnatncttctgccttggcactctcacacatgctgggattcaggcctgnanccnaggcagagagaaacgggaatgctanatcaagttcacagatttgactgttaccgtggactanacattccaattactgatttggaattgtctgaatctnagagtcaccacgggaaactgtcttttacagaagggaaggcctgctaaaatttccttccagtggc

SEQ ID NO: 660 - DNA, 486 bp, homo sapiens
  misc_feature (1)...(486): n = A,T,C or G
cccccaccctgccataagccattttcagtctcaagatcaattctttttcgtgagaatgagcatacctctttcagcaggataaccacagggncgnggcaaatattgtttcatgggtttccagctttgtttttggagctcaaaggataaagngctcccacaagaaagaataaagagagaggaaagaaggtcctttgttattagcatgactgaaaaagtcaccagaaagcaggagccccaattctccatcttgnnatggccagccaggcacatcctaactgcatctaccagactgctaatcacctnaaaatccaaccccacagcccagcctctggtctcacttttctcctcctgccttcaccttgcttggaaagacacatctgactggctcccaaaatcaanttcactgggagaatgtggcttggnagtgcttttggaatctatgaaatgctctacagaagggagggtatctttgaataaaaagctggt

SEQ ID NO: 661 - DNA, 387 bp, homo sapiens
  misc_feature (1)...(387): n = A,T,C or G
atcatggtggaagagcggctaatcctgcagcagaagatggtaaaggccctccaggatgagcaggaatcacagagacacgggtttgaagaagagatcatggaatataaggagcaaatcaaacagcacgcccagacaattgtgagcctcgaagagaaactccagaaagtcactcagcaccataaaaaaatagaaggcgagattgcaacattgaaggacaatgacccagccccaaaggaggaaaggccgcaagaccctctggtggctcccatgacagagagcagtgccaaagacatggcgtacgaacatctgattgagtttacaaaagaagtctatcctcaaagaactgacagttttcanagaaaccaacgtttgaatgggaaagatcca

SEQ ID NO: 662 - DNA, 306 bp, homo sapiens
gaggtggatactgtgactgaatgaactcctacactctgcacacctgtgaacacccaaagctgaggagaagacctaagacttgggaaaatgtaccctatggtcaaccctccccttccaacggggcagccagcgggaactgtgactacagagcccaatcttcttgtttcctaatgtggtgctgaaatctgcaccatggggtagtgaccccacaaagaagccaggcaattacatatgttggttcatttcattagtttatggaaataaaatgcatacaactgtttgctgataaatcatcccatttagtat

SEQ ID NO: 663 - DNA, 504 bp, homo sapiens
  misc_feature (1)...(504): n = A,T,C or G
gattgcactgcctgatggattgagattggacattgtggccttgaaaagagtgggagcaggggccagaatccaggcacaaatggccacagtggcatggacataagaggcaacaatggaggaggctccagaaatgaagattcattacaaaagtgtaacaaaggctgctcgccattcaacattaccctgcaaggagggctgatgtgtgaaggaaagctgtccttctagggttgaaaatgttttaagccatagttgatttttgttcagtaggtaagtcaatcttcagcttgttagcaatgtgccacgttcttcctacccaaagaaattcatgcactcaatatataaatcaagatgtctggtgaattaccatagctgcaggtgcctggcaaccaggattagactgatggccactaatctacgggctcctgattccttctaaggatgtaatgtgctgtaaagggcttccatatttctaaacaagtccaaccagangagaaaccttcagtc

SEQ ID NO: 664 - DNA, 408 bp, homo sapiens
  misc_feature (1)...(408): n = A,T,C or G
atgatgaagactgaggggccatcaaggaatgctgagtggtggaatgatgggatcaggacctctgaaacactacaccacgagtaaataaatgcccnngnatnctccagntctnncnnnaatcccgcaccctcttcctgatttgaatggaaactcactcttacacaaggncatnctggaatcccgnaccctctttctgatatgaatggaaactcactcttacacaagggcatcctggaatcccgcaccctcttcctgacttgaatggaaactcactcttacacaagggcatcctggaatcccgcactcncttcctgatttgaatggaaactcactcttacatgagggcacggcttcacctgctttgtctcttctgagggatgctcattctctgcatggcagcatctgtgt

SEQ ID NO: 665 - DNA, 210 bp, homo sapiens
  misc_feature (1)...(210): n = A,T,C or G
cctgctgtcttgatttttncgncagcccctgggccacaatccatnctcaacaaagctnacgggngcgcttcgggttnttttcttttttcttaacaaggcccacattttnaatttcttacntcactggaatncnnataganttnacataaccccaggccccacttatacnnctccactcctatgacactgntggnccaacatggtttgcta

SEQ ID NO: 666 - DNA, 558 bp, homo sapiens
  misc_feature (1)...(558): n = A,T,C or G
actttgaaatgtttcctgagagggaggaagagttcacgaaaagaaacgatagagaaacctncgnatagaaatgggnggganaacacaccacgaggatgaagaaccagaagaaggagagacctagcagagagggcatctaagatggagacctggtgcanggaannttnttaannanacgagaagttgctgcaaaggcagagggacggggagccaccangatacacagnagcacaggaacgcttgaggctggtggaggtccccncccccctccatccccggcacctccctctgtccagcagcagcaacatcgcagcaacatcatccagtccttccaccccccacctcttccntngacggtgggaagaagcctcgctatggggtcagacagactatcaatggcgtgctggacatggctggcctgngntgcttccagcttgtacgaggcaattgtgaaatatttgggaattttacaggcccgngttggtagcttgaaaatggccttggtggggagtattttacaccacaggaattggcnaacactccaaattggggcttttg

SEQ ID NO: 667 - DNA, 287 bp, homo sapiens
  misc_feature (1)...(287): n = A,T,C or G
aggatagggttcaggaggaggacttgaaaaaagatcgtctcagggttgtgaaagaagatacaatcagcaagcctctgagaaatcacagctgatgactaagtccacagtctgctcataaaatgtagagttatagctcttgctctcaccactgtctctgatgagtctgaagaattgtgaatcactaaaagtctctacttctttaaatgtctagaaagactgttcaaatcacctggaaagcttgcacttttttttttaatctanaagacaataaaaagttgcaacatcct

SEQ ID NO: 668 - DNA, 332 bp, homo sapiens
gaagccaggcgaagtgggcaaaaattgctcccaccttccagaagaactttcaaaaagaataagaaggtggattccacaagcacaagcctagaggccgaaagccaagagtggggtttctggggtggactactgctgactggcctcagctcccagagaagacgcagggctccacaccagaacaagtgatgtcagacagccttattttgttctttgatcagttaccggcttgaagattacattcaatgcaacaaactctatggagacctgactgaggcaggccctgaaacagagtcttgctccgtcacccgggctggagtaaatggcatcatctc

SEQ ID NO: 669 - DNA, 389 bp, homo sapiens
  misc_feature (1)...(389): n = A,T,C or G
aaagagacaggaaaatcctgatttaagcctcagcagcttgtcatgctgtagaaagctgcgtgacgttccatggtgcttgacggaaccatgttttactcatacctcgcaaccacatggttagatcaagcacaacagaaaatctcgctacattatcactacaccaaccactaggccaaagaatgtttatgaccacagtaagagtattactaccgatgatttcctggaaacacaaagaaggggctatatggaaaaggtgcctccaccattcctcagaactgcagaatggaaaaaacagctttcgggaacaacatccaggnaagaagttgaaggtgctacatcaagcaacatgnaaagtgatgactttcttacggtgactcaattccaagtag

SEQ ID NO: 670 - DNA, 171 bp, homo sapiens
  misc_feature (1)...(171): n = A,T,C or G
aaaagactgatggccagttttggattcagcagtggctataatcnttgtgctacttcttggggggaagattggtagagatatngggattngggngggnaatccnagaagttccattttaaacaccgttaagtttgagacaccaataagatatacaagtccgagaattgcttg

SEQ ID NO: 671 - DNA, 396 bp, homo sapiens
atggtgtatactgttagaggacaagaacctgcttctagccatctttgcgtctccaggacctgacttgtgaccattcaataagagtttgatagatggacagactaatgaatagatgaagatgattagaagccaaaatttctgaatcttcctagcacccagaacatggcttaacatcaaggaaatgctcactaaatactgtcataatggaatgaatggaaccgatgcctaattgaaaatcattaggctgtaaaccatttccatgttccaatttcttcgtttatagaacagaaatgatagtgtaaccacctgaaaatccttcaccctagacttccaaaaccacacccacctcatcaaatgaagtctgactctctagaaagaagcaaatgactgaaaaag

SEQ ID NO: 672 - DNA, 114 bp, homo sapiens
  misc_feature (1)...(114): n = A,T,C or G
gaaactctcacacccagggtttnngtctccnactggaaaatgctacaagttntnctactactgaaaantttttgtaataacaacaggnttttcnttggaacccgcaaaaaaaaa

SEQ ID NO: 673 - DNA, 373 bp, homo sapiens
atgagaaaattgaggcttggaaagggctcacactcatatggtttaacatgaagcccagtgaactgtctttcaactacataatgtcctatagcatcctcagaacctcacagtcattggattacaagcacagactcgtactccaactcggtcgccatcttgggtccgctgtcggcgctgccgggggcgaaacgtaagaccggaggcggagcacgggaggcggagatgcaaagcgcgacaacttctgttgcgtcacttccgcgcgagttcaagttagtttctgagattaaccttttcggtgacgcggggagccatattgaaacctggaaacgatgaggctgcacggctcaccgtcttggataatggcaaagatttt

SEQ ID NO: 674 - DNA, 294 bp, homo sapiens
atcactgaagagaggatcgtgacttaaacttgccttgaatctctatagtgctgggtacttggggctggatacagagtactcgttacatgaatactttcttattcaaaggtacgaagaattgcataagcatagttctgcttctagaagaaagccacggacttagactcaaagtctaaggcagggccacaaaacatctcaatagaaagaataactaaaccaggattgacttaaaagcttgagagcagaggtcatggctcatcaatctttgcatccttcacagtgcccaacacaatg

SEQ ID NO: 675 - DNA, 202 bp, homo sapiens
  misc_feature (1)...(202): n = A,T,C or G
tgccttcatatgagaagtacacctaaaaatttgaatggggacctgtgggaagatcctggtgaaactgncgacattgagctcctaaattctgtggatncttctctgccagtagaagcaagccttccaccccatctgangatattgactntgttatnaagcaggagcctgnggnggcctcttntgaggatggtggggaacatgg

SEQ ID NO: 676 - DNA, 535 bp, homo sapiens
attcctggagaactgtcaaacttccaaatatttcaaagatgaaagaaaggaggaaggcagactccagtacttccttcccatccacaccctgtggaccaaccctactcagcctccttcatccactgcagactctggcttctgctcttggccttctcttcacccctaggggctttaactgtcataggtgacttcagagtccatgtgacactccatcaaacaaccttacccccaacccccctacccaacattcagttacctagtcccttccaatctaccacctgttgaactagaccagatctccccactttgtaggccctctcccaggtcaggctacccccacctctagtctctttgcctccagcctcatcctctctcacacacactccatcgtctgctgccagagagagccttccataaaacacatctcaccacgaggctcccctgctttaaactccttcagtgacttcccaaaggctacaggataaagtccaactctcagtgctactatacaaagtccttcatgatctgaccttgc

SEQ ID NO: 677 - DNA, 391 bp, homo sapiens
gatactgagatttcagaatatggtttgttgctgttgttgctcacctgtgttttctgactttgctgcaggcctttactgtctggagctgtcttccctggagcttctgagccataggcgagaatggtgtctggagatacataggatctacataattgaaaactccccaaatccatctctcatgtgaagtatcgactgcttttgttcctttcactttcttattattttttttccttttctacttacggagactcatttttctaactgaaaatagaaaactttatcagattggaataacagtccctcttgctgtagttttttttccccaaagactggatgaatttgggcctcgtcagaaagccatctgctgtgtacgaacagacctattcagggg

SEQ ID NO: 678 - DNA, 256 bp, homo sapiens
  misc_feature (1)...(256): n = A,T,C or G
catactatgtctgcgaagctctcagggnctgganancaagcctgggatttcccacattaaaaggggatttacangtgattttnnttgggnaatcttaagaatcncantattttaccaanccttnnaattttggacnnncccccgaaggggctttcttnccttttattaccaatttatttngatgngcccaaaccgggagggnaanattttnggcctccaagaattaaaaacaancttggccaggcccggggggccc

SEQ ID NO: 679 - DNA, 148 bp, homo sapiens
tatcgtgaacatcagtgcagcagttctggtcacctggatttataaacaccaagaagtagcaacagccagtgtgcaagtcactgacaacccaagtcaccaaaaatcttactgagaacccattagctccttgaattaaagattattttgt

SEQ ID NO: 680 - DNA, 357 bp, homo sapiens
ggctgctgtgaagatcagatgagttgattgctggggcgatgcctaataaagaagaaggctcctgcgggcagaaaggaggaggcgatggaatgtgggttgacttgcacccactccggcgccaacataggctcccgcctgctggaaccactcacggcctgaccacaccaagcagcctggaggagcctgcatggcctccctggattttcagaagaggaggcgaggaaacacctggagcagcccagtgggtcctgccaaagacaacgatgggagagtgatgaggataaacagctgtctgtctctggtaatgcaattaggagctaaaatattaaacactttacgacaactgtcttttacaga

SEQ ID NO: 681 - DNA, 356 bp, homo sapiens
atagtcatcttttctgcaaaatgaaggactgcacacagtctctgtgtgtctaactctccgaactaggacgtgagaattctcatgagggttctggttgatggccacaaaatggaaaaggcagaagagcttcggattttttttagaaccttcagaccccagagggcatttcacttgaagatgctactcgcctcatcccttcagaagattaacagatggaagactctgagaagtcatctagagatgtctttagaaatttcaagcacgttttgcttaacagttcatgtcacactttgattctaccagaaggcaagggactgagactaggatgactatgattaaaagaagactggagatcc

SEQ ID NO: 682 - DNA, 361 bp, homo sapiens
  misc_feature (1)...(361): n = A,T,C or G
attgaagaccaccagccgcaatgaattatgctgaactccatggtggttttgtgacagtaacatatgaagaccagaatgagaccacaaagtccacttgaaacttgaagttagatttcgggcttgatttttagcaacatgtatgcctagctggatgcancagtctccagatgtatttgacagatattgtatccctgcttttgcaatccttcagcttgtggtggttattttttttccctanagcatctcaaaattgtaattagattccttgttgttgatggcataaatgggtttcaaaaagggcttgnagccttggttaatttcctaatgaataaaaccaacagcacacgcttaaaaaaaaaaa

SEQ ID NO: 683 - DNA, 401 bp, homo sapiens
gattcttcaccaattgaaaactgccacatacaaaaaatggcaagttgagataaggtaactcaaggcggcacctggagaacagaggctgctgaggaaatcatcgcatcatcagctaccagagcctccaagagagcccggcccttctcaccagagaggggatggcagggcctgcctggaccacctccacctcagggaaggaggataggaggggatggagaaaggggaaggttgaggaattgtgacaaaaagagtagaaccaataacatgaaactgtctcagtgaaacacacagaggggctaaaaccccattgttatgtctttaaagtttatttaattaacatgaattctgtcctgtataatttttatagaaaatattcaacaaggaaaaaataaacacctttt

SEQ ID NO: 684 - DNA, 588 bp, homo sapiens
  misc_feature (1)...(588): n = A,T,C or G
tggggggagcttaccttgggttttaantccnaaacttgtngtggacantggccaggnaaggatttttattcttcttcccattgtgggggggncttgcaaggcaaagttcattgnagaanaagntttgggggacccaaacttgggcccggtngtacanttgaacccaaaacccgggattgggtnccgtattanttggtgcattgacnggtcccanggaagccttgctgggccntcctccttttgngggcccttgaagnggaacccttgggangaaagaacttcaagtngacaggcccaggaaagaaatggccccacttgccttggttacaagcncacccttgggaagaaactttcattaaaaaggatggtcttnacaagnccttgggggggacaacccttgccccaagnggggggcccccaagcccttacaagggggaacnttgggggccaaaaagnatggatggtttttcaagaatttacaacttcccaagcccttggaagtcaagcaaccccccccttaancaaacncttggccctttgggggaactttaataaaaanaacccgggccggncccccccttgggcccc

SEQ ID NO: 685 - DNA, 417 bp, homo sapiens
  misc_feature (1)...(417): n = A,T,C or G
gggggggaggctacccttgccttttaaggttcaggaaaacttggaggaccaggnttttttggccnccattttggcccccaggattggggccctttggaaccttctttggggggcttcaaaggtggaacccaccttgggctttgggnccccttnaaaactgggttgggaaattaccagggcccnggggcccaaaatggggattcttaaacttgggccccaatggggaaaaaagcttngggattaagaaangggcaaatggggaaaccctgggncattaaagttccggaagaacaaaaagcaccccaccaggnttcaagaaacaaatactttncccaaggggcaaccctttttttaaaagngggggggcacctggcttcccttttttggcctggtggnttggcttggaaaaagaaaaaa

SEQ ID NO: 686 - DNA, 472 bp, homo sapiens
  misc_feature (1)...(472): n = A,T,C or G
ggggctctggggactcctgccttaagtcngactntcgccctacnctnttgaccnagaatganactatttncnanttaagangccaacagatcacnaaaagncctgtgtgcccagncacaaaatnnttttnnctnaanggnagcgcgctctnttatgtgatacctactattcccagcccattttgtangaaagtagaactgatgctggcttntctttgtcttattccaaangntcgggccattgangattttcccttgcnattanaaaggttcgttngangaccttgaaagccttggngaaagggtgccgctctagcaaaaactatcccaaggggaagcctccgttgttgtnaaaaaggntattttctcccacgctccaagcgatnncatagacntaaaaaagctaaaccctgtttgnaaagctttttggtngggcttttgggccgggtcctaagtaaccacttatcattttc

SEQ ID NO: 687 - DNA, 291 bp, homo sapiens
  misc_feature (1)...(291): n = A,T,C or G
ggggattatcttggaaaacgggaaaactccngttgctgngangggcccggaaaangnttngntntntgaaantaccnccccnggggattttctgaaaaaaaattngaaaacctttggggggaaattttggaaaaatccctccnaaaccnnggaagctttaaaaaggntggncccagttccctggaacccgggggntttgaanttggggggnaanangttttttttaaangngaaacctatgccaaannggggggggggacccctgggattttaaaaaccccccccccgggg

SEQ ID NO: 688 - DNA, 171 bp, homo sapiens
  misc_feature (1)...(171): n = A,T,C or G
tgggagcaattgttgcttgngggacaanggacaaaacnatttctcaatcaaattccaacaangcatatttcngggtgnattttttttaaaaccacttacaagcttatttggttaagggnttgccttgcgggaacaccncttgggggccctcttgtccttggatgccttgct

SEQ ID NO: 689 - DNA, 199 bp, homo sapiens
  misc_feature (1)...(199): n = A,T,C or G
aaaattccccgggatttcctttggggtcnnnccgncacnaacctgtaaatngggggtggggcttgaccaacacaagggaagccaaaaaacctgtattatcatctccnggngaaggggggattcaaaggggaccggcttgaaaccaagacttccccgcttgcttgggtggtggggttgacattggtggaatggcccccag

SEQ ID NO: 690 - DNA, 237 bp, homo sapiens
  misc_feature (1)...(237): n = A,T,C or G
ggaaggttttccatcacccangctggacgggaagtancnctttcttttaantagatgccacctgccttgggnnccttcaagtntggaattacaagggtctcactcgccgaggttggaagtgcaagtggcacccgggtctaagccntgatnnaagngttnanangantacttattttccttttgnaaaagatggggngttttngccatgattggctganngctttatcaaaaaaaaaa

SEQ ID NO: 691 - DNA, 153 bp, homo sapiens
  misc_feature (1)...(153): n = A,T,C or G
cctaggctggggtggcagtggcaccctcntanctcactggcagcctttgaactgctcancctcangcgatcctcccttcctcagccttctgaatttcctccttggccgggaaccanggnacttagtgggttgccttcagtttaagggaaccag

SEQ ID NO: 692 - DNA, 359 bp, homo sapiens
tgacaagaggcctagtggaaatgactgttgggtgtagaaatggtgacgatacttcctactggatgccctgaagattggggaagatggagcatcacccgatgtgctgggccctgagtgaagcactgaagatacagcagtgaacaaggacagatgggattttcagccttcaagatggccatggatgatccctttctcattgtattcatgcacttatatagcccctttccacatcgaattaggttgacctttgtaatcaagagaacattctggaatgatgaagtagtatgcctgaagtgaggtcattagaaacattgtgagttcttgttttctgggggaagccagtggccatgttaggatct

SEQ ID NO: 693 - DNA, 209 bp, homo sapiens
  misc_feature (1)...(209): n = A,T,C or G
agacactgctagcagtcacctagaggacgctgcatcccagtcctgcatanagtacaatgntncngtggcctgagagaactancangaaacnncnaacncncgtggcttcactgnactttggggcttaagatgaagataaacctcttgcttcatgacaataaagacaaagaagaattttgggaaactgtgtctggggaaacaaagaaaaa

SEQ ID NO: 694 - DNA, 424 bp, homo sapiens
gtaattctcttggatattccaggtagtcaaggatgcagatgtccctccctgagccagagacaacctgagtgacagccccaaaccccttccctccaatgatcgaagctttgttttgggatccagctgcttctgcctagctgccttgcccctctggacaagtcctcacccaagaagccctgggactatcacatagagacagcctggtatgccatttcccagatatggccaaactactatggacttcagagacacacctggcttgagattataggattcttgatcttattcctacttgcttcagttattgatgaaaataggctgagcctcataacaaatgttggagaatgcttatgttcacttttatttggttaagaatgaatgaataaatggatgaatgaaaggatacgagtcctattaaagctgt

SEQ ID NO: 695 - DNA, 204 bp, homo sapiens
  misc_feature (1)...(204): n = A,T,C or G
ctcttcacctttccatctcccaaatatncaatctcacttctataaaatctnnnnttanactaatanaaacncccacacntactanatattttcaaaattcatattattntaccatctttcaacacaantttnttcttcattnaccccanatctattcatacnctttctccaactcntaatatcacttcattccttttaacctcc

SEQ ID NO: 696 - DNA, 228 bp, homo sapiens
  misc_feature (1)...(228): n = A,T,C or G
ccctaacgcccagggctatgacncctacctagtgccangctgtctagcgtgcacctcctgcngagcgganaggncctgaaacccatggctggntgnttggactccnacanaccaggattttatcaaggtctntttgnatgaggantaaanccctnatatggctacttctgcccanctatgngacgcagnanagactgctcatcctgccaggcccaagtgtgaacctgc

SEQ ID NO: 697 - DNA, 361 bp, homo sapiens
gcccagaaccaagcgcccatggacacccctacacgggcagcaagggctggaaccggcagcctggtggacatccgccctgcagggctctccctcgcagagactgcagaagagggtgtgcagtgctcagcgcggaaggatgttctccctgcttttaaggagccgtgactattttgctcagcgtccctggcgtgcctttctctgtacaaaaaggagacttagaggcttccccatcccattaccacagctgggcggcttcttgcatgagggcaccttgctgaactaagtcaccccaagctaccctaggctccctgtgcactgagatgctgagtcctgaggtgccttccagcaccagtgaatggga

SEQ ID NO: 698 - DNA, 303 bp, homo sapiens
tttggaatccagatctgatcacactgtaaaggggcatgacatttgaagacatggatgaagaatgatgtgagaagttgggggcagaggaaacttattggacaacactgaaagtgaggagagtcctactgcaaaggagtgagaataagatcatcaagaaaagctgagacaattaggggctataaagaattaagtaataatgagtgttaaacctttcaatggagttaccttttttgtatgtgactatctaagaactgtgggggagggggaaaggaataaacgaaaaagaaaaggcaaaaaaaaaaa

SEQ ID NO: 699 - DNA, 380 bp, homo sapiens
gtccagaaggaggctggttctggatgaaagagaagcataagaactccatccacactattgcaaaagcttcaagttcctacagcagcaccttaatgtggaccaatgggagaatgtaacgcagtggaataaatggaagcttattccaaagccaagccatagaagagcaccaaatttcccacagattgtctgttcaatccccagcatcgacagaataatgtccagcctccctcctcacctccgcttgatatttacacccaacgaacaatggtcaaatggaaatctactgcttagtttataggttttcgggcttgtgacagttccactgtagatccctaatcaaagttggattcaagagcatggcttaggtttaaagccctgcg

SEQ ID NO: 700 - DNA, 387 bp, homo sapiens
attggttcatattacagtgccaggaggttgctttctgtatttccaaagaagctgctgactggaggaatttctgagagaatgaataaactctgatccagaagtggaaaaaagaggctgaatggtttctgttactatcaccattcgcatgtcaccatctgctgggcggtacacagaaaaatctttctgaagcacaagaccagctatgatcctggaatctgaaacaggaaggccagtgacaccaacattcaactctacaaaatggtcatccactaactcaaatacaccaatcccacttttacaagtcatacacttgaaaaagtagtcacacatcaactgtgaaataaatttatgattatttcttcccactcttccacaaaagtatgcttc

SEQ ID NO: 701 - DNA, 578 bp, homo sapiens
  misc_feature (1)...(578): n = A,T,C or G
ggcctgagggaagctgtggttactctgcccagcgatagaagaatttgtgacagatgcaagggatcatcaagtaccttctgtgttctaggagaaacaaatctgctaaagggagctgatgtaaacccctgaccccgaaatgaaaggacagcagagaaagattccagtcagctctgctgccacgttcttcagagtgaatgagattaattcttttaaagtcatataaacaaaggctttgtgctgttactccacaaacaaatgtgaaattccagaagctgagctttgcgcacacctacctgtaaaccccacacttgctttaatcttggattaagagctgtcaggcttggtgctttgagctagcattaacctcctgggctttccagtgtgatgtttggaaaagtccaccaattattctgcccttgctgttgganaagttgtgccgcaagggggaacatagctgcaaaangaaaactgnctgattgggctggatctgggcccccccaaaatctnatatggaattttatcccaatgttgaagaagggccctggnggaaggggattggatcntggggatgaattccc

SEQ ID NO: 702 - DNA, 186 bp, homo sapiens
  misc_feature (1)...(186): n = A,T,C or G
cccagcccattgcccttcacttgggggnangggcccttnancatttcttagcccgggcgggctggccacaagacttgcttgggggccattnttnccattgnacggaaatgaagggncgngtnggnancaagggaagtccattggaaaanaacttnaaatttccgggaaaaactttccccttgtaaa

SEQ ID NO: 703 - DNA, 209 bp, homo sapiens
  misc_feature (1)...(209): n = A,T,C or G
aatagagcactgtgggaacnactctgcgagctgctanctggnaccacctggaacttgggaccaccgtatatctggcatgccatttacaagcgtccgantgtctacattggcatcacataccttgtgaccacatcggctatacatcattggagtntatgaggaaaaagcgtcgaagtncgaacatcgcgtgaggtacgagtaaagttcaa

SEQ ID NO: 704 - DNA, 203 bp, homo sapiens
  misc_feature (1)...(203): n = A,T,C or G
gtataatttcagacttcccttgacgncggcncaatatatataaanggngacccgccttntgnggcccataaatcntacattggcgtnttatttacccccnntgnaaangganacattacctctatanaatcccnacacttctgngtntatttttacccccccgaattctttccacatacgcanntaaaaatgttaatctatat

SEQ ID NO: 705 - DNA, 264 bp, homo sapiens
  misc_feature (1)...(264): n = A,T,C or G
gaggggagagttctgatgcaagtactcactncgagnanacngtntggtnnnanatgaaccantagagantatggcctgagggaatgcttgnctcattntttnaggaaagctttaatantatgcnaaaataaacgaggtgnttttctnctantancnctcncattaggtggcccttcaaatantctttggatntgcagcacntttcttgggctccaacaattttttgaggaaagaantaaattcctcttggtttttaaaacccac

SEQ ID NO: 706 - DNA, 108 bp, homo sapiens
  misc_feature (1)...(108): n = A,T,C or G
ttttgtcatgtttactntnctacatgatgatacaaatgacatcngananngtgcttcttgtgactccgccattgggnccanaactcttctcccactattgctgtgtga

SEQ ID NO: 707 - DNA, 236 bp, homo sapiens
  misc_feature (1)...(236): n = A,T,C or G
attaagcaagctttgctggaactgtcaccccttnctgtgcttctgggttgaaaactcatncatcacctgcctgaataggtnnattggccttcangagaaaagtcanncaaatgttaacatgcaggacgattactggaaaacggnngnaatggggncacggcagcntnnngttaacacagctgattttgntcncnngnggggggccnccctggtgnaatccaacttgagctggctgg

SEQ ID NO: 708 - DNA, 283 bp, homo sapiens
  misc_feature (1)...(283): n = A,T,C or G
ggatggcttgtttaccangctcttgggnctttcaccatcaaaaaanatgngctagggaagccttatancacccaaaggacnctagtaaaggggaanggcccacaaaccatgccttttatttcacttttggttggggcttccttcaattcattggaaaccaaattanaccggnaatattttttcttccgccaanaaaaccttngaaccttggccnnaacaaancnttagacanaattttttttaatncaattccttcnccccnccccaaaagccccactttttt

SEQ ID NO: 709 - DNA, 126 bp, homo sapiens
  misc_feature (1)...(126): n = A,T,C or G
cagatcctgaaggcgccagggntctttgnccctgtncactatctgttgtggnctgcttnacaaccatngctnctgtcccccnttnnaggctccatggctgctgantnaaagaacagctttgacata

SEQ ID NO: 710 - DNA, 455 bp, homo sapiens
  misc_feature (1)...(455): n = A,T,C or G
gaggattacttttctgtcctcttgaagttacaactggatgcagaacttgatctggacaccaaaatgtcagnagaagtgatatgagatacttctgaccagaagttttgtgaaaaagttcattgttgccaacctcttctccccctgcagaacccaagtagaggctatcctcaatctggtgagacaacccccatttctggggctgattcaccctgacctttgcccagaatggcatttcctgggntgggctttaaaaaanggactangccnnaaaaaatatttccagaacccaagccttccttttgccctctagattttgggctgncttctttctgagctactttaggtgggaacatggcatttggagtatttatcattgcagntggaattgcacaaaatanttttggantattggactccaaagaaagagggaggacatgantgaatttggagtagaa

SEQ ID NO: 711 - DNA, 172 bp, homo sapiens
  misc_feature (1)...(172): n = A,T,C or G
caactccaactttccaagttctntgcnttcncttccnggcancttatnactntgacgacaaaagccattacaccaaggcggcaaggaggaagcccnncgcccccnttgttcatttgaaacttctttnntattcaaagtgcttgccaacaanccccagtaccaacctcccctc

SEQ ID NO: 712 - DNA, 171 bp, homo sapiens
  misc_feature (1)...(171): n = A,T,C or G
acagcatggtggacacaggatgggtgttacagattctgngcataacatccaaatatggggcgaaagctntcacccnagaaacatnctangaggggccaaanagctttattccctcngtggctntcttgtagnganaaaccactntatgttttgcncgaaaaaaaaacccaa

SEQ ID NO: 713 - DNA, 318 bp, homo sapiens
  misc_feature (1)...(318): n = A,T,C or G
ttccagggagaaggctgtgacagtgctgagccaaacaagaaggaaacaaccacagagaaggaaagcagaggatgacagaagaactaatgaaaaattaacttatctttcaacntccacaatctgtctgctctttgaatattttaaaggaaatattgaatagcagagaaataaattcctggcttaggtttttttttcatcttgcagagagtgagagattctgtcataatgggaaaggaaacgaatttcttctcaacatgttaaatattaccagctcaaaactaagtaaccaataaattgctacagacaagtaaaaaaaaa

SEQ ID NO: 714 - DNA, 312 bp, homo sapiens
  misc_feature (1)...(312): n = A,T,C or G
atgctgcccaggcatggtggtgaccctctctaaacaagcacactcagaatttccctggctcggctgggcgactcanaagaaaacttggccatcagcttctgcctcaagcgggtgctgtggcaaggaagacagagcatgtgtgttgtgaacactcattagaggatcatccctgctgtgccaggtgccatggcgctggatgcagaaagcaggacacatggaaagatgggtgtgttcacaaagaatttggaagaaagccagatggtgacaagagtgtgtctctgaatgccccttttgggggtcactaaaaatgca

SEQ ID NO: 715 - DNA, 550 bp, homo sapiens
  misc_feature (1)...(550): n = A,T,C or G
aatttgaggtacatgcacactggcanggactataccnagcgaacagntatgccnagtgcccactaatgagaggcagggaaaggtgggaaaccacagantgtctancataacacaattgctctatttaccctatttttcccagaggcgtaaccangaccaggcanaactcttttgtcctctncaccngggnagagacgcaggaangcgcacgggggagncatcgtgnctttccnttgggncctctcgcatagaaacgtggggaatggcacaccttggtggtacattgtagaccaagatggttttncgantcttcgacgccccagtgactctnttataagtgggcattcagagcggtaacactggngcactcgcggcgaacanagggaacgggacnnncnacaccttttattggaanttaacaaggaaggggtgngggaangggtcccttaattggggnngccatttttgggcttggnanactcctttttaacatttaatcccccnttgnactcnttgggggaagacctcgcnaaatagacccaaacatttt

SEQ ID NO: 716 - DNA, 332 bp, homo sapiens
tcgaagaaactaaagctcggaaagattatgcgactgaatcaggaatgaactcaggaggtttaatcctgcagcctgtgctaccattgtgctgccctatcatatgttacgctatcatcaccagcagtggctcataatccttttcggaccaaacgatctcaggggatttgatgatggcgttcccagaaatctacgtatatgcccaactttgaatataatttcaaagagtccactgaatgcctgtctgcatcccacccattgacctttatctaccccctggcacagggatctctgcaaatcgggctatgacctcttactccacaggattaaaatca

SEQ ID NO: 717 - DNA, 581 bp, homo sapiens
  misc_feature (1)...(581): n = A,T,C or G
ctgttctcttcctacggactgaatgaaaaataaaaggaagtcatttctgcatgtgtcacagaggcatcctttggttctaaaggaagctaagttggattccacaagcccatggtccttatagcatgtgaataggattcagtcacggacgagaaggaagaggtccaggagagactgtaatcgccctgtccaggctaaccctccagctgtgcaggagtatcaagtccaaaaagaagctcttcaaaccatctgggaagagaaaacagcatgacaaggaaaggtgtatttgtctgattctaggaatcaatataaacatccatgataaccccatctaatttttaaatgtatgatttggatgaaacaagagaagacactgattgttgctgagtccctgctgtagtcctgacacagctggagatgccctgctctccttattttcttgatgctcatgangaccctgatgtctaaaggaagaanggtcttcgtcaggtctgnccctggtgtgncacgtgccaccttgcnacgcacacgagaacctgacagggtttatgattttagaacataagntttatgaatggtagggc

SEQ ID NO: 718 - DNA, 168 bp, homo sapiens
atccgagtgatggtggacctgtgcaacagcaccaagggcatctgcctcacaggaccttctggaccaccaggacctccgggagccggcgggttgccaggacacaacggattggatggacagcctggtcctcagggcccaaaaggagaaaaaggagcaaatgaaaaaaaa

SEQ ID NO: 719 - DNA, 467 bp, homo sapiens
  misc_feature (1)...(467): n = A,T,C or G
gtatccaagatcaagagggacaattacatattataagccgcacagagaagagtaatcaaggtggacatgaacttgtgctatataagttatgggttgaagaactctgtggaaagtagagaagaaaaaatttagggaacaagcagtagttgaatacagctatgtgaaactatgagaactatgtgaaagagtgtttggatccaaagatgaaagagctgacacaagagtggattttctgagagctgtttgagcagagaaaacttgaaggagatacagtgagtagaacacaacctgtaggtggtttgaagacctgaggactccaatacctcccaactctcatattctctatagtttttctagaaaagcccatgtattggggcataacctataaagatgatagcaactaaaatggataaatcaatgacataaaatgnttatttcttctcttgattaaatgacagataccccaa

SEQ ID NO: 720 - DNA, 244 bp, homo sapiens
  misc_feature (1)...(244): n = A,T,C or G
actgagaggagttccaaactaaaaataaaccacagatctcagcaaggctctataccctggctgttgcccttgtcactgacttttccttattgaaagctactcagagacctgaggaaagctttgtgctaataccgatatgattgctgtcatcgccactacctggataacatcactattgnaaaacctcagattgcggctcaaaganagntttcagaccctgccttgatggatcagcttgcactac

SEQ ID NO: 721 - DNA, 479 bp, homo sapiens
  misc_feature (1)...(479): n = A,T,C or G
aagaccctgttagtgaccccagcccaaatctgaaaggcatttgcatccctgtgagctgggatcagcgcacagtggccggtgcctgatctccacagagcgagcacaggaggtcgactttctgggaggaagtaaagaggctgacgcatctgctagactcaaggacagtcccagcagcacctccactgcgtgcggagagggaggaagcgccacggataaggagagccagcttcacagtcaggcacagcctcaaaccccagccgtgccgctttttggagctgtgacctccttaccctctcccagtctggttatcctcacctggaaaacggggttggccggtacgtccgtccnagggttgttgcaaagacagaanaggagcgccacgcacagactcacaagaggagctcaagngacgctgggcccttccttcccccactcatggagttctgcaacaccgaaaatcccgttcactcaaaaaaaaa

SEQ ID NO: 722 - DNA, 279 bp, homo sapiens
  misc_feature (1)...(279): n = A,T,C or G
gcgctggggagctcctgctttaattcagaacttgnaatttttaaagccagcttaaatggatcctgcagccntaganaaataaattctncctnggggagcttggaaggtgaatttttccaggcttacctggnaatgcttgatgagaagtgcagccccacagccccctttactggcagcctttgtgagacatcaagcagaggacccaactaagttgtgcccaccacttctgactcacagatactttgaaataataaaagtacattgttttaaaaaaaaaaa

SEQ ID NO: 723 - DNA, 784 bp, homo sapiens
  misc_feature (1)...(784): n = A,T,C or G
tggggaggagctgggctagcttnctgggatttanagttnaanaaactggangggcttttctttnttttaaaggncttggataccatttaaacaacaagatgcnttaccacttgngggccccggaaatttggattntnntaaaatncttgggttnggaagggaaatganaccttgggaccccaaaaccancccatttgaccttnggggagggggttggnaatggtaccaaacaagcaaactgggaacccacattggtggttancaaantttttgtcacacaactttgggaagccccaggggcacttatcctaaagcttcaagaaggaaattggcccacaaaatctttcacgaagcctcaatcattccattcctttgtttcccggggagggcatccttgcccaccaagtcagggcaaggggggctaaatccaagatgtccagggatgggaaagcctttccaagcaagggagggaagcaagggtgtaaaatccttgccacccaggggaaaccccaagcagggcccgcctcccaactcccaagtgggcacaagatggacgactttgcaagtgggaccaccccttgcagggcatccaaagggaagcacacatgccattggagggaaagccaccacaagaatcaagcaaaatggaaattcaagtaagcttgttttcaaaattttttcaacttaaagcttgnccttcgaaatttggtggaattacatggtgaatcttttatcaattggattaatattaaatggaataagaattggagaacacaatttggcc

SEQ ID NO: 724 - DNA, 439 bp, homo sapiens
  misc_feature (1)...(439): n = A,T,C or G
caggatgggagcttttttacaccgggctggggaccctccctttgggcaggagggggcccaaatcccccggcttcttgagccccagtgcccnggtacaggaaccnagggacttggaggggtggcccgtgaagggtggcggtcaaagcaacttcatggagaagacattgtggacacggccaggatggaggagaaaaaccnaaggatggttaccncccaaaaggttccttttcaagaaaactggggctaaccttttggtcccaagtcaccacccccttcttttgcccaangcctggnctttggcattattaaaaacccttggaaaatctttaaacattnaagtcaaagaaaaggcccctacagagggtcactgggacttgggctgnnggcttttaaccnttctaagaaaaattgggttaaaccaacccaaaggccaaaaagg

SEQ ID NO: 725 - DNA, 114 bp, homo sapiens
  misc_feature (1)...(114): n = A,T,C or G
tgaggacgctggggagctacctgcttantgnggaactgcccatgggacnaaggacggaantntaagnccttgtncttcntcccgtgaaacnaagcatagcttcggcacttggct

SEQ ID NO: 726 - DNA, 464 bp, homo sapiens
  misc_feature (1)...(464): n = A,T,C or G
gcctcagcaagcattacattgctcacttcctacgtgctaaggtttttctttgccttatgtgattagatgtgccgaacatacttccaagatctaaaaagcagcaaaatttagggaagcaagaagtcaattgtattctggccttctgctgctttggaatttctgctctctcagagagctctaaagaggcatggcaacacagagcccctccttcctggtgattattatacaaggctcccactggcctgttcagctggggcggggggagttgatgctggaacagaatcatctgccggctaggtatcctggaacagtaattaatactgtttgaatggctgagactatccaaaaccaaccactttctttctactaaagaaaatttcaactncaaacccaagacctggcttncaatatagcaaaaactccncaaagagaacataaaacatcaccaaagtcctggtcaaaaa

SEQ ID NO: 727 - DNA, 525 bp, homo sapiens
  misc_feature (1)...(525): n = A,T,C or G
ggaagtcccattttggaaggacccgngggggtccacncacnctttcttcacccttttttgcaatgggcgacgtggaagcgngcccggggaangngnataagcctcatgccgtcaacngaagttcaaaagaagcttgggtttacccaagcacgttgccccatctngctcaagnggatngttggggctctcttgnattgangaaacgaactganaggaagctttgggcatngttgnaaatcaagggactcngngaagctcanagttcaaattgaagtacttgggaagaatttggattgggggggggaagcttgggccaaaggggaaaatcaaggggaaaggaaaggaaaaaggaccttggaaaggatcaaggggaagnaaaagttaaaaaagcccgcccttgggcttggaagaatgggggggtngggggcaagggccaagaagcttggaatcaagggggcccgaagcaagaaaacccgcactctttcccaaaaataaaaagcctttcctcctttggaaaaaaaaaaa

SEQ ID NO: 728 - DNA, 598 bp, homo sapiens
  misc_feature (1)...(598): n = A,T,C or G
attatccacaggtttggcctatctcctgaggtaacaccaggcacatctgttgatctcctcaaacaccaagacagcaacaataatggacttacaaaataaaagctagagagagagtcttttcaaaacacaacgggaaaagtaactcaaaatgagataaccagcagatgctccagaatatggaagtcatctgtaagcgtttagtggaatggagaatgctgaaacagttctccatttgccagatgcctgaaatagagacagatgagctattcctctgaacttcaacaacagcgccagctgaaaaagcagaccctttctgccaagggtcacttgttggagctgttgactgtaaatcagagttctccttttggacttatggtacccagaaaatgcaaccaaaatgttcatatgtgcaccttaccttgggcacaaagaccatcatccttagttgctgaaggtctgtgggggtgggcacaaattgtttagatgttttgaacaaangtacctttttataaaaacccgcatgttgtcacagcatttcttaccttttccatgacacaaaagcttccaaataaaataanccacatttcaaaaaaaaaaa

SEQ ID NO: 729 - DNA, 191 bp, homo sapiens
  misc_feature (1)...(191): n = A,T,C or G
ctctggggatttacctccctttaagtgaaaactgncgtgagntgggttacaaggctacttgtnntnaaattntcatngctcntccccattttgtgccctnnacgggnncaccnactganctacctgcanttcctgntttacaccatnactttaaccttcnaccccttgctgaccccactcatccttaagta

SEQ ID NO: 730 - DNA, 323 bp, homo sapiens
gcatttaatcatctcgcatcatcacatggaagaagggactgcatgggatctctaatacccagagcattatagatgttatagaattttctcagtgcaagactcttcacacacacgaatgtgaagtttgtggaagatgtgcaacatgtttaagatgaacatttactaactgagacctaaacccacgcatgccattctcagtatttctaagaaactaacccttgccaaggaaaacaagcagtaagaagacctactggcacttcagacacttaagaacctacataggctgggcacggtggttcacgcctgtatccagcactttggga

SEQ ID NO: 731 - DNA, 261 bp, homo sapiens
  misc_feature (1)...(261): n = A,T,C or G
acaaaccaccaccctggggcaggtggangnagcccaccnttgggagaaaaaccccgnccaggagggnaacnttccaaagcctcttcctttcaaanttgggtcaancgggccangaatgaaaagaatgttttgatggaaaagaaaaatatttattggggccanggggtcttggcccaanaaagtcaattcattggggccgcttggcattggggnactattancccagaagaaacctgcatgggttttttaattaaaaaaaaa

SEQ ID NO: 732 - DNA, 411 bp, homo sapiens
  misc_feature (1)...(411): n = A,T,C or G
cgtggactctcttgagtgcctgttactgtaccaaaggaccgaaacggtgaagttcattcgactcagcaacctttgctaagagcttactacaaggacacccaggtgaccaggacccagtccctgctaagagcttactaccaggacacccagacaacgtcctgctccggtgcccggaagacacgcgtgccaggcttggctgagtcctgcagccccagccatttctctccacggtcattctcagggctttgctgacccatgtgagcaagttcccggccaaatatccacatctcgtgtgatcccagtgtaagacagaatgtcttctttggtagcacctttttnttttggccttggattctttaattaatctattttcaaaggaataaatnggtgccctgcaactccaaaaaaaaa

SEQ ID NO: 733 - DNA, 565 bp, homo sapiens
  misc_feature (1)...(565): n = A,T,C or G
aaaggtggagcactgggctgacnatctgtagcangaatacttatntcgtcagcgacccgggacctatctacnaangganacacatcnatgcgnccatttttgtgnactgattanncgaacatgntnatcngtncctagaatacaaannntttcttaggnttggcaggatagacngatnaattcccggacgccaatcgtgatctacgagccacttggctcacactccactccntatctgctgaaagggacacaccccgaagtatttgcacgaactataaaaccgcactgtctgncatcgggancanagcatgattggtaantgccaaggatcccccaccttgctttacaagataagtgngtaagaagaaaaagacntcanattntgaagccaaaganacttgngttnnatcctgactntgccattactagctgggggcncaaagggttnacgatctggatcttgcaagactggtgtctgccttccctnttcctnttgaaataaagtcctgngcttacncaaataagacaattggcaggtgangtanggaataatgctggcccattt

SEQ ID NO: 734 - DNA, 112 bp, homo sapiens
  misc_feature (1)...(112): n = A,T,C or G
gactctggggaagctaccttgcttaagctaccnacttaagggtggggcccttaattccatctgtccttntttaagaaaagaaggaaattttgggcccccaaaaggaaacccc

SEQ ID NO: 735 - DNA, 347 bp, homo sapiens
  misc_feature (1)...(347): n = A,T,C or G
aatgtccaggggccaatttaacatatgatgcacattgcttgccttagctgaagaattnctagtacactttataaagaattctcgtgggaacctagaagacttgaaaactctaatgtcagggctggaatgtcaaatgtggcagtgactttgcttcaaatctgcaatcaagagcaacatcccagaaggtgttaattcatttcattacttaattaattaatataaatgagccaggcctaaggccctgagtgaatgcacggagcagaactgctctggcagcttggaccattctcctctggactattattttagataaaaataaatttttaccttgtttaagcaaaaaaaaa

SEQ ID NO: 736 - DNA, 545 bp, homo sapiens
agtttgagaagcactgatataaaagacaaactgaaaagaagaaaggaagaggggtagaagaaaggagggagagaagaaagataagatgctggttagaggcaacatccacgttattatggaagtggcacccaacgctaacctcagatgcaatatacagggggaagccacagacagcgcattctgctatatcaagaacctcagaaccttaagagtggagcaatccgtccaactccttcattttccaagtatggacaccagggtctagagatgtaaaaaccttgatcaagatcacagagtaggttaaagaaacagaaacaagcaatcatgggatccctagtccaatgcccttccctctacaccaacagaaaataacacttgatgttgagctttctctcccatacccaccacttatatgctgacaatgtatgtcaatgtgagaaaatcagagccgaactaaagaccaagtcttcagaatatgtcacgtggtcccccacaaaaaggctggggtcaagtgattcattatttagcacaggtttttggtgcaa

SEQ ID NO: 737 - DNA, 386 bp, homo sapiens
ggtcatcattaagagaagagccaagaaagggaccagaagacaagctggccccaaatgaggctgaccccaatgctgaggcagtgagaatgagtgaaacatctagttgccagaggtgactgcgtttgtctgaggataaaatagctgcacacaaccttgtgatgaccatcctctgcatgccccatgggaagtaccgctaggcctggacacaaggcttccttttcctgggctctctactgggctcaatcgcctaatgaccctacaaatggaacaatgtactttcaagaattgagtaatatggatgatcaatgtgttactctcgtcctgattcgaaacttgtcttttcatggagagcaataaatcttatcagtagatgccaaaaaaaaaaa

SEQ ID NO: 738 - DNA, 465 bp, homo sapiens
gtctttggccagaactactattcaagaatttccagagtgtttgatccatcaacaagggattttgcataatatcacattacactgagaaacccacttaatagcaaaggagagaaggcagtggcacatgataggattcattagtcctatcatatactgtatgacttagaagctgtcactctgatagaatgaagaagtggccttttggagaattttctatggtgccatacttcagatgggacctttgagcatcatcttccagaatgcaatgaacatgctacatcaataacaactataggtactatgtccccagtaggtagaattcatggctccattagccaaggagtaaaattaggagcatctttcttaccactgcctctaatgatcaacttggagaatttgtgctttctatcccccctactctggactctgaagatttggaggttctggcttccaaaggaagaagga

SEQ ID NO: 739 - DNA, 108 bp, homo sapiens
  misc_feature (1)...(108): n = A,T,C or G
atgctgtttgtgaggccctgcacagaggattacgaatgntataaactgaaccatcccaggtgccanggcttaancctgcctctactcaatatacgcaattcagaaaag

SEQ ID NO: 740 - DNA, 548 bp, homo sapiens
  misc_feature (1)...(548): n = A,T,C or G
gtctttccttctttaagtctgataccattaacacagatgctcacactggggccagatctgcatctgttaaatcctgctgcaggaatgacacctggtacccagacccacccattgaccctgggagggttgaatgtacaacagcaactgcacccacatgtgttaccaatttttgtcacacaacttggagcccagggcactatcctaagctcagaggaattgccacaaatcttcacgagcctcatcatccattccttgttcccgggaggcatcctgcccaccagtcaggcaggggctaatccagatgnccaggatggaagccttccagcaggaggagcaggtgtaaatcctgccacccagggaaccccagcaggccgncttccaactccagtggcacagatganactttgcagtgaccacccctggangcattccaaggagcacacatgccattgagggaagccaccccagaatcagcaaatgggattcagnnagtggtttnaaattttttaactaaactggctcgaaattggggaaacatgtgaaacttt

SEQ ID NO: 741 - DNA, 354 bp, homo sapiens
gctggcatactacccgagagaatgaccagtgccaccaagggaagggcacaagctcactggttccaggggagacatctcaggggacaggaacatcccctgacgctgaatgagtgcagcacacagacggagaatacacacaagagaaatcatgaggacatgagagaaggcactggcaataggaagttacaaaaagcaacaaaaagaaagagtagatataaaaacaataatcgaagaaagccaacaacagatgggatgaatcatacgaggtatgcgactcatggatgaagaggtgagtgatgagatcagctggggaactctctcccaggaaagacaaaccagaagaaacacaaatga

SEQ ID NO: 742 - DNA, 603 bp, homo sapiens
  misc_feature (1)...(603): n = A,T,C or G
actcctcacttcatgcctggcatgcttgctgagtgactgctgggtgatgtaaatctcccaactcaacagagacgcccatccagaccaggattcgcccactctcccgggctcctcatcgcaacctgacattcctggagggcgcagggtttctgccaccagccagttgcataatcccagattggggaaatggaggccttgcccaagatcatagggagaaggaggtgcagagcctagcaacgaagccagagctctgtggctacgagcgggttcactccagtgctgggggaagggggctgctaactaatgccccacagcttccctgggtggagttcagactcagctatcaacacccctggctcaagcagggcactcagctcctggctccttaccttcctggattctgtgggcacagggaggcatctcgccaggggtgagtacgtatagagctcaaaagcagggagtgccaagaacatggggagtggattcaacctggactctctgagtgcaatgggngttggcctacactcatgaagtctctgaacataagcctgggtacccaaagatnccctctaatangaacaaancgtgaagggtggcctgtgt

SEQ ID NO: 743 - DNA, 410 bp, homo sapiens
gcaagaaaggagtgaagaacagaacctgctgcttaagtcccttttatcaagaaatgcaaaagccttccccaaaggctttttgacctcccgcctttgacctgatccttgttggatagactgtgtcatgtgaccacacagcctcaagggagaatggaaaagagaggatttaatgtttccagcccttacagtctcatgaaagaagtgtgacaacagagaaggggcttgggtatgatgatgggtccagctaacctacagtgtctgcaactgcacacctaggatacaaggtggagacagagggcactgtgcagtttttctgagtctagggtgggcattattgttttggtgtatgaccctgggtgtccaaaagagactcctgacaataaaacttagagttctgcgttcttgtgaaa

SEQ ID NO: 744 - DNA, 544 bp, homo sapiens
  misc_feature (1)...(544): n = A,T,C or G
tttcaggaggcaaacgtggcccaatccagggaaatcagcagatggcatgtcatggccatcgcagatctgaggagctggcctttgggtgacttctggtccacatgacaaacattcaaggtgaattagaggagaaaagctacatgaagtgatgtgcaagttgaaaagagaaaagggtgtggtgctatccaggaaccatctaacgaaaaacctcttgcaaggcagattgagaattttaaaacaacactctccgacccaactgccccgtgacatctgttaacacaaaaggcagaactatttccaggaaaagctcccagtgtttgcaaggcatccagcaaaacagaacatggagactgaggacagaaaagagaaagaagcgtagggcaagacccctcctccaaattgcagggtgagatgtcaagactgctgcttccctgatcaagataacagaatgggccacaagtgaangctctagaggaacaggaatatggataaaccccagctctggaaaaaatccccaatcgtgaagaaattcgttttggaaatt

SEQ ID NO: 745 - DNA, 402 bp, homo sapiens
ggggaagcggcaggagagaactaggacatctttcctcgctgtgctggccaggaccgaggcagccagagtgtatggctggagaaggacagagaagcagcccgttcgcctgcagctggggtgccgggctccacggctgacagtgagtgagaagggccagcacctcacaccctagtaacggccaatgtgacctgagccctgctgacctgatgcctagccctgcagcggtcacatccccgaacccagccctgctgagaccatttcgtttttgctcatctctatgggcagcacaggcctgacaccgtagtaggcactttataaacatgtgttaattggttgaatgaacataagcaatgatcatctccattgctgagataaataaaccacagctcagagaaaaaaaaa

SEQ ID NO: 746 - DNA, 306 bp, homo sapiens
gtctgagcagagggcggggtgcaggcggaatggccctcgtgccctatgaggagaccacggaatttgggttgcagaaattccacaagcctcttgcaactttttcctttgcaaaccacacgatccagatccggcaggactggagacacctgggagtcgcagcggtggtttgggatgcggccatcgttctttccacatacctggagatgggagctgtggagctcaggggccgctctgccgtggagctgggtgctggcacggggctggtgggcatagtggctgccctgctggaaaacactggacaaatgg

SEQ ID NO: 747 - DNA, 329 bp, homo sapiens
gaggcagctgtatggaggccaatatgcagacaagggaagtaactcaggcattttgggggagaggtacagaaagaagagaaaagactgaactgactgctgttctgaacaagaactgtgactatatgtggtactcccagaatgctggtttcctttcagacccatcaagtggccatcctattggcttggactgaagacccccactggagaactgtctctgcagcctatactgatgacactggccactgtccagggctccaccccaaggagtccaagccccagacatttagccttagagagaatccagattttgcatttccagtgcagggatt

SEQ ID NO: 748 - DNA, 116 bp, homo sapiens
  misc_feature (1)...(116): n = A,T,C or G
gaagcacataactggacctngaattccanctcatctgtcctgntcatgtcatgctangctgcccatgcctcaactttatcaatanaatgagggtgttgngatgactaaaaaaaaaa

SEQ ID NO: 749 - DNA, 251 bp, homo sapiens
cactccttcctgtggattttctccctccccactggaatgtgatctgcatgaggtcaaggactgggaccgaattgtccctgctggagtctccgtgtctagaagaatagtactggacccacagcaggcgctcgatagatgtatgcatacagacagagcttcggagatgcacggctttgggtttgagtcacgattctcgcaccaaccacctgtgtagccatcatgaatcactcaatctctttgaaaaaaaaaaa

SEQ ID NO: 750 - DNA, 743 bp, homo sapiens
  misc_feature (1)...(743): n = A,T,C or G
aggcctaaacccttggccattttaaaggttncaagnaaacctnggaagnaattgtccntggggaagngtngnnanactgtttgggannccccncnttctncaagcgaganacacaattctagcctaggcacttgtgacgantcgttcccattgcngtcgcnagttcgggccaagaatgcttggcatgggcatgccttcgngccccttctatcgcgtncttgcatcgtctacatcgagtttcggccatcaacttggaccacacaacgattctaccacatgggcnaggaaaatttgaangaagggaaggaaacataggtctttaccattcgaaaaggctaggactaggtaggccaaaggctatcgtacatanagggacgtacacatangggtggtngttggcgattgccgtcanttcacaaagggaaaacccctattctttaagacccgtatacaaatatccccttcgtgtnggncgatagggnncgaaacaattttggaangaacaaatctattttaancgacaaccntttcccccttttcctttngccggaancgcgccaanacnnngggnacncccncgattgggaaccnttncccttngttcncccnccncncccacnttntntgtgaancngnccaaanncgntaatttngtacncccaagcgtaataganaaagacngngccttccaacgttaagttattttcgtcctacacngggtccgagttacaccaatgaccgag

SEQ ID NO: 751 - DNA, 335 bp, homo sapiens
ggctcctcaggctcaagcacaacctggaaaaacgaaggtgttaatgttccatgaggcaactgatgaccaatggggagcaggagctggtgaatgaatgttcccttcatccatcctgcagcttctacattgttcttcatctctgggaaatcagtgacccatggactggacaataactttgagccatgcagtcaaaataaaatggaatatttaagtgaaagatcaggttctggaaaataaaactgctcgtagctgcatattatctaccggtgagtaaaacaagtttactgccaccatcttagtgtgactaaaagagggagatcctaaagaattttaag

SEQ ID NO: 752 - DNA, 261 bp, homo sapiens
  misc_feature (1)...(261): n = A,T,C or G
tcccaacatcagcagagacncccatccanaccaatgattcgcccactctaccggactgctcatcannncctagacattcctggatgggctcatggtntctgncancatncnttngcntaanactagatnngggaaatggaggccttgcccaactncatanaggcgaangaggtgcggagnctaacaacgaaatcagagctctgtggntnngagcgggttcactccnnagcatgggggaagggggcttgctaactaatgccc

SEQ ID NO: 753 - DNA, 652 bp, homo sapiens
  misc_feature (1)...(652): n = A,T,C or G
cccagcccccctttggaccnaaaaanagggttccaaanccttaagccccccccttttgganggggaaccatttcaanncttttttngggccccttccaaaggggggtccccttaaaattgggggccaaggccaaagaaaaacccccaccttggnaccaaggaaanccttaaggaaaggggaaagttccccattttgggaagnaaccccggtngggggtnccacccccacccctttcnttttcaaccccttttttgccaaaanggggccaagggnaangggggcccccggggaaaaangggaatttaagccccttcaaagcccggttccaaacccgnaaggtttcccaaaaaaggaaagccttggggttttaccccccaagcccaagnttttggccccccccaattcnttggcnttccaaaaggggaaattggtnggggggnccttctttcnttttgggatttgggaaggnaaaaggaattgnaaaagnaagccctttttggggaaatgggttggnaaaattccaaaggggaactttccggggaagncctccaaaaggttttccaaattgggaagtttaacccttggggaagnaattttgggaatttgggggggggaagnccttggggccccncaanggggaaaaaattccaa

SEQ ID NO: 754 - DNA, 410 bp, homo sapiens
  misc_feature (1)...(410): n = A,T,C or G
gaattgcactgcctgntggaattgagaattggacattgtggcccttgaaaagatgtgggaagccaggggcccagatntccnaggccacaantgggcccacaagtgggccatgggaacataaaganggccagcaaatgggaagganggcttcccagaaaaatggaaagatttcatttaacaaaaaagtggtaaccaaaaanggcttgcttccgcccatttcaaaccaatttaaccccttccaaagggganggggcttgaatggttggtgaaanggaaagccttgtcccttttctaaggggtttggaaaaaatggttttttaaaagcccattaagtttggaattttttggtttcaagtaagggaccaccacccaaaagataaggcaagcccttcttgccaaagcccaaggga

SEQ ID NO: 755 - DNA, 254 bp, homo sapiens
  misc_feature (1)...(254): n = A,T,C or G
gaacccttgtcatccacaatttcccnaaggatgggttgcganancaccacgactcctgcgaaagaatgctcaggggcntgccnngnntntgcctgcctnttccaagaangcntncatcactttcngaaangctntccattgttgancatcataaccggcacatgtnaatgacctggagggctatnnaacactggcttacattggcctcatattgccccgaacagtatcatcaccgctttgccctggtggggaaa

SEQ ID NO: 756 - DNA, 376 bp, homo sapiens
  misc_feature (1)...(376): n = A,T,C or G
ctgcttgctgagtgactgctgggtgatgagttctanntcatntntncagagngtccctgcctctnnnaccntcatctcattcttcctgnctctctctcatctntagnctactntgncattccccccaanccaaggnagggcaaaaggtcccaggggttcccgggganccagggncccccaaatgtgccccntggggatgtgaaaaaagggcccncttnnatgnggcccgtcaaggactccattggacctggggaaaggggaaaagggcaagccaaggaagcccggaagttgcttaaaaaagggccattggaagccttgccttgnaccaaggaaaattgccattgtgggggttcaaaaacccttggaccattgcccc

SEQ ID NO: 757 - DNA, 308 bp, homo sapiens
gccaccagagaatctaagttcaagtccccaaacagggaactgggctctcatcctaattcttccttaaggagccaacacagtcattacctccacataaacatgtcaattctccccacgcgcaaccatgagaaatctctcccagccagccagaatggaaggaactaacagcttttggcaagcagcacggtctcacatacagaaggtggctggcatgaggcttgcactcaggtcacagccttctatcggctgtcgtggccacctcttcctagaagaagctctccccaggaaaagcacagaattctgctggg

SEQ ID NO: 758 - DNA, 330 bp, homo sapiens
gccctataagtgtacatctgggtcatgctctatgaagagactgttgttatcaatgagttcgatgcatatatttgttagcactgacagattcagacacagatattttccacctccaatgttcagatctggtgtagctgctgggagccctgggctggatatgtacccaggtgactcatggggaaggatgcacccttctgagaagcatcacctttctcaagaagcatgacagagctcccgatattagactttcaagacgtctaccaggccttctttggaataaattgtgtcattgaatggccacctgcatcccacacaacagctcattccgcg

SEQ ID NO: 759 - DNA, 454 bp, homo sapiens
  misc_feature (1)...(454): n = A,T,C or G
gagtatgggataccggctactgaggataaactggaataccttttccaagaacgtctcccaatatctgaattattcttctctaaagaagcggctgaatataagtatgaaaattctgatgaggaggctcaagaagctggaggcaagaaggagagagaagaggatgaaaatgaagaactggaagaaggacttgaaaaggatctggactcagcagagcacagccccttcaaaaaatccagcttggaggcagagaaataaatagatggagaaagaagaaattaatttcctcttcatggatgttctagttttcagtagctcaaacaactggttttgttaaagttcattacacaaaaatgatatcaactgatatctgactttactcttacattttacatatatatttgacagcatttgttcacgttaaaaaataaaagcttgnttgagatgaaaaaaaaaa

SEQ ID NO: 760 - DNA, 346 bp, homo sapiens
  misc_feature (1)...(346): n = A,T,C or G
gtttccaacttcagccgttggttcctcagccttctacgccttccactggaacccaaggctctttggtcaatgggcagcccgagtgtttgggctgcttagcnttcagagggatgtgctgctgatgtctgtcctttttaaagagagctagagctgaaaccttactgggaactggaagatggaaacacagcggtgagcctggagcagggcgacgccagcctggaggccctctcttcctgcccacaacctcacctcctcacatctacactgcacacttgcaccggccttctttctgcttcttgggaccacagantgagaagggacccccagtcctgctagctccttgctt

SEQ ID NO: 761 - DNA, 307 bp, homo sapiens
gtggggtctttcaaaaggacaccagatctgaatccgtccctgtcctcaagaagctccaggcttagggagggatgagacatacgcgtgagaaagctcagaccccagtcacaacagcctgggtgtgaatctccactctgcctttcctgctgtgagtcatcaagcaaaccacgcaacctctgagcctctgctatgtcctgcgtgcaatggggagaagagtccctaccctgacatcacacttccaaggcacaggcactgtctgtcctgagcacctcatttcaggctccaagctcaggaaacgctttaagtc

SEQ ID NO: 762 - DNA, 309 bp, homo sapiens
atgcagcatcgtcagatggagcttattacacggctgggacctcccttggcagaggtccaatccccgtctctgagcccagtgcccagtacagaaccaaggactgaggtgtccgtgaaggtgcgtcaagcaactcatgagagacatgtgacagcaagatgagagaaaaccaaagatgtaaccacaaaagtaccttccagaaactggcctaacctttggtccagtcaccaccccctcctttgcccaggcctggtcttgcatatcaaaaaccctgaaaatcttaaacatcagtcaagaaagcccctacagagg

SEQ ID NO: 763 - DNA, 325 bp, homo sapiens
  misc_feature (1)...(325): n = A,T,C or G
gcttttcctgctgtagatgcatgaagggcgtgctgagattcaattagtttaccacctcagtggatttctgctatacgtacagattaaataccaatttctnttcatttctgcctttcaacattaaaccaaggtgtgcgtaatgacgacaacagctttcaaccaaaggccacaaagacagcttcacaggactgagcgacgtatccacctggatttatctttatgcaaaagtcttcatttatggcttctttccttgttctttctccaaaccaaccactgtaaactacacaacatggctcttttgcttattcatttttaaaaaaaaaaa

SEQ ID NO: 764 - DNA, 322 bp, homo sapiens
atccagaaaccttagctcagacttctcaaatcccagatggattgtaatttgttatattggagaaaagaagaaaatctgtgctccctagcagatgcacaaggactgttttgttagtcacatctgccacgttcctacttttcagcactaaaagaacttttttgcaagctcttcagatcttgattctgaaatgcaaaagcagaatgatgaggcacgtatttcccaccttgccagagatgttttccttctttacctaaatggtctggagtttacacgcaatcatgccccgcaacacatagaggggtctggcagagccataacccat

SEQ ID NO: 765 - DNA, 473 bp, homo sapiens
  misc_feature (1)...(473): n = A,T,C or G
gctcgccctgctactgaaatttacatgtcacactgccatgataagtcaaccaaccatctcatatatcaaaggagagaggcagagaaagaaaaggaggaggataaagaagaggaggaagaggacgaaaggaaaaccaagaggaggagaagccacttcttactttggattaatgtgaaattaaatagtttactacattttaagtgggaaaacgttagttgaaaagatatttgtcaaccacaaacatttgaaagggaagcattccaaagattttcactgtttatgttcaaattacaacatgtgcagaaagttgtgcaactgaaaatcctttcaaacaacagctacaaaagagattggtcagttatgacaggaatagaaagngggaaacttaaagactggctactccttgtgtatgattgctngggcgagnngggcttganaactttttaccaaaggggnctttgctgatatgagaa

SEQ ID NO: 766 - DNA, 185 bp, homo sapiens
  misc_feature (1)...(185): n = A,T,C or G
cgccaattttttaaaaaatagagaccaggcgttatagaggcnccanaatnttctttttttagcgtttttttctnacccccctagggggaaaagggaaaaaatnaccttcaattaaaagacccacncctgctttggtgtnatttttaacccccccacatnctttcaccanaagggaaaaaaaaaaa

SEQ ID NO: 767 - DNA, 324 bp, homo sapiens
ccaggagacaggctctggagaagaaatgaatgctaaatggggatgagaagatgaatccagcagaactggtggtaaagcattagtgactggacctatacaatgaatgggactggatgtgactgaaaacacatggcaactgattcattcttgccttattaagtcatcttcaaagtcaagcaaagtaatacttcccatttccctgcagaggtatcaaggctattcacggtaaatcaggtgacagaaggcttgattcacatccagttttgtggggagacatagtcattgagtaatttgtcttgctcagtgaaggacagtgatctatgt

SEQ ID NO: 768 - DNA, 353 bp, homo sapiens
  misc_feature (1)...(353): n = A,T,C or G
aaacaatacacagttctggccaaaagaagttaaaacaaatgtgaaaaataagcgacatccaagaaactttcaacagcttccttttgntcctatgccttcaagggtacccagaaganggnaaaaangaaccccnaggaaagcttggaaggaaacctngactngcaanccncccccatngctttctnggaaagggnagttggntaagaaagannggnactttttttttcaggggnaagatggtttttncttttggcttccaaanantttgtggggatgtgcacttgganagggaaaggtttcacaaattaccttagaaaggaaccttaaaaagggaccttggagaagatggaaac

SEQ ID NO: 769 - DNA, 213 bp, homo sapiens
  misc_feature (1)...(213): n = A,T,C or G
tagcggacctcactactcanggtcctatgcccttaatgaacatgcaagaaacgaagctcgantcanttatgttgaatngggacctttttgcgtgcccnatnacagactctttaccccactgcnttactgangatacgttcctgggcgctgggangactgctctntttaccaanaaatttgnaggcggggcatgaacttttaaatcaaaaaaaa

SEQ ID NO: 770 - DNA, 244 bp, homo sapiens
  misc_feature (1)...(244): n = A,T,C or G
tccctaaacttcatccacctcccttntgctctatgcctcaaggcacacacttaggtncaaaangaccccccacagaggctgtgaggaaanctgaactgcaaacccaccaggatgtacttactgggaaaggctgggccgntnnngaaagatgggaccnttatttntgggcccaangtttttncnttggctttcctgactttgntgggnagactnnanagcnagaagttnacctttgataaagaga

SEQ ID NO: 771 - DNA, 356 bp, homo sapiens
aggctcaaagaccgtctaggaggcaagcgagcaggtgagcggaagccgagagtcaccggccggccggtaccggtctgacgagtcaccgagcagattgcagctgggcttaggagagataacatcagcatgctgcctactgggagggaaactctcccctcacaaccccaccagctccgtggactctacagccaggctcgcgcatccttggtgaaagccaacccaccccagacaagtgtcaagtgaactaaccctccacttcctaatcggagggagctatttttaagagctaaggtctaatttaagctctgccaggtcatctagaataaacaggtcccaccccaactcaaaaaaaaaaa

SEQ ID NO: 772 - DNA, 104 bp, homo sapiens
  misc_feature (1)...(104): n = A,T,C or G
caaagctttccattgccgaacaaaaangtcatggggngctttncaggaggaatncaatannnggagtccnggaggctntatagccccnaacagtattattaccg

SEQ ID NO: 773 - DNA, 217 bp, homo sapiens
  misc_feature (1)...(217): n = A,T,C or G
ggaaactacgcgcaccccttttttggagcaaaagttcaagccttgggttaaaagttccaaagnntggaaatttgggcctcgcttggnccaattttaaaatgggccggcgccctcggaggggaaatttcggggatcccagccgccgccatttttaanattgngcccgccttattgggccaaaaatcttttttggggtttttttaacccttggggaaag

SEQ ID NO: 774 - DNA, 201 bp, homo sapiens
  misc_feature (1)...(201): n = A,T,C or G
tccaaagcttgaatttggcctcgcttnccccattttaaaaatgggcgcgcccttcgnagggaaattttcgggatttccnggcgcgccaattttaaaaattggacccggcttattgnggccaaaatttcttttttggntttttttttaacccctggggaaangaaaaattaaccttcaataaaaancccacccttctttttt

SEQ ID NO: 775 - DNA, 216 bp, homo sapiens
ccattcaaagattgtgaaggccacgtctaaatcctgtgatccaacaatgtgcccagtaagagaataaatggacctctagcggatgggctgatcaaagagggccagaattcacttgaaaattctgaaaggatcagaaattcaccattacacatgcgagcaaaaacaccaattttattttgaaatgaaataaaatcatgtaaatgctaaaaaaaaaaa

SEQ ID NO: 776 - DNA, 150 bp, homo sapiens
  misc_feature (1)...(150): n = A,T,C or G
cgatgaatgcttcagaactggaggctgtggttgttgacatgccctatacaanggattgtnactgcatncctctgtctncacgacggccactgnntncttcttgccttattaatgcatcgctcggaagctgctctaaaggacacttgccat

SEQ ID NO: 777 - DNA, 142 bp, homo sapiens
  misc_feature (1)...(142): n = A,T,C or G
accatgtgagtaatgccggattggannacnatccaccaaccngattcaaggcgtntggatgtctgtcactcnngtcgacanctngactactgacatantgatgagactctgcgncccaacnaccctgctaatgtgttcctga

SEQ ID NO: 778 - DNA, 215 bp, homo sapiens
ctggaaaattcaacctttacagcccagagaagcatttatgagcgtctattctatgtgactacagctccactaagggtcatgaccaaatctgtgtgttcatcatcatatccccagcacctcttatctattgcgtggaagaatccatttctatatgggaggagacttgtgcaatcagatgttaattaaaatgtgcgcatctttttacaaaaaaaaaa

SEQ ID NO: 779 - DNA, 480 bp, homo sapiens
  misc_feature (1)...(480): n = A,T,C or G
atatttaagttctatgaaactgggacttntatttgcttnaanggggtatatggaagnaaaaantttaccccggtaataggggagccccgggaggggaaaaggnattgttntttcacctngggngggggaaaaccggggcttngaaanaatgccntntgaaaaancattgggattcaacaagtcctggnatacttgnggccaatttcatttcagggggaaggataggaacccctanaaaaagggcccttccttncctanaaaaggggtccagaattaataacccantgggggaaagnaatgtcntaggaactnggaagttggaaacccgggntccagggccccaaagaaaaaacttggcttggccnttttngggaaattacccangggattccaaaagaaaangggaagccttggggnananggncccgggcggaaaantngggccttcanttgccccttggtttaatttcccccaaccac

SEQ ID NO: 780 - DNA, 125 bp, homo sapiens
  misc_feature (1)...(125): n = A,T,C or G
cgtggttggattgatgcacnttggtgctcggnaacgcactgngtnnaatatccttctcttttagagaagtattangttttgcctctactgctgttattggtggatacccattctgggggggcctt

SEQ ID NO: 781 - DNA, 423 bp, homo sapiens
gaaaaacattgtcccacaatgggttacttcagatcctgcaggaagcaactgctgaggaagaatttcgaaaatctgcaaaaatttattagaagaaacacctatgagaacaaatgaaaaggttggatgaaagggttgggcagaaggacattaaggaacatttgaattaaaatctctggattcaaaacagatgctcttgtctactgcacagtgttctagtgcctgtttcaaagtcttgatgtgagaagtcaatacatttacaaaaggaaagttctaagacttgccgggaccacttctcaagaaagatttattaggaatctggatcagctctcttaatgaagacaaaaaggctggaagatattttgaaaaatattctttaatgtcttaaagaactgacgatatagtaagaacctataaataaaaaaa

SEQ ID NO: 782 - DNA, 393 bp, homo sapiens
  misc_feature (1)...(393): n = A,T,C or G
acctcggacggcttcgcaccaaccagcgccctttttttnctgcaggactntgaatcngganccccctgagggctttcacttgcccgcgggggggaaaaagcccctgggaagtggaaaatgaatggccccccatgtgtggtgaaaaaggcgccttttgggaaaacatggatnctgnngntccaagaantgnnaantgacctntgttctgtgngcccaaggggcccangngaagtgtttttaaaaaaaaggttaactggggggcttntaaagggcttattttgtcccccaagnttgaatgcaanggggcaaataagggtnantggaanctttaacttggntnaaaaagaatcnccccctaaatttttnaggaagngggaacccaaaaagggcccc

SEQ ID NO: 783 - DNA, 238 bp, homo sapiens
  misc_feature (1)...(238): n = A,T,C or G
tgatcagctctaggcttcgactgnntangaaaagtgggaagacnnactgggngaccngctccattttggaaatgatcaaacctggcnaagcgaaagtggttnttctcccnaaannctgacccgatntcnngaaattcaggntggnttcngcctgacttgnagagctacagncagtgcctttcttctgaggcctccatgttcangacccttgggcggagaagaatctgctagacactga

SEQ ID NO: 784 - DNA, 200 bp, homo sapiens
atctgattcacctgatgaatcacatgaagatgatgcccaaatccttcaacagctccaggatataattcaccacttctaactgcctattgaacagccactcgaatgtcctcccaatgccatttgttgactgggatggtcttcccacattgtcatagactccaacatgtccaaaattaaactcttcaccccaaaaaaaaaaa

SEQ ID NO: 785 - DNA, 146 bp, homo sapiens
  misc_feature (1)...(146): n = A,T,C or G
atctgattcacctgatgaatcacatgaagatgatgcccaaatccttcaacagctccaggatatnnnnccccccttttgngcnngttcagcctggntaagtccaagctgaattggccaattcttttgnnttttaccctggaagaaat

SEQ ID NO: 786 - DNA, 479 bp, homo sapiens
  misc_feature (1)...(479): n = A,T,C or G
ttcacagatgaggggaacataatgtgatgaaagaacacctggaaaacagccaggatgctggaattttagtcttanaagctggtgactttgggcaagtcatcaaatatgcatcgtcctctgtttccttnctcataaaagtggacattgagaaaggtgatcaatgagttcttcatcagctctaaagtctgtactgctgcttctgtacatctctgttaatatatttggaaacagaacaaacactatggcagaagtcacacctaccatgccggctgctgagaggattgaatgagtctgcagctcacgtggataagggcctggtccccagtaaccactgcataagatctacctagtattctattcagtatttcattaatcaagtcttacctgatttatgtctttggttattaattttccaatttgtaaaatgaagttcttggattaaatgaatattaaatgtaccaccactgacaaaaaaaaaa

SEQ ID NO: 787 - DNA, 424 bp, homo sapiens
ttgcccaatcagttcctttgaaaactggacctcaaaagagaacccccaaaagggaggccctggtatctatctcagccttggttccctgaagcagagccactactttattcagggtggagagcaatggagagtgcggcagggaaggagggagagaaaacaggatggggcatgttccccaactgacctctgcttggcgtccagtgcaactgagcctgggatcatgaggaaccatcataaaggcagcatcaggacagtccgttcagagagggaaatcccccatgcagaagaccgtggatccccggaaggtcttggtattgttgtcagagaagcctgaacccatacactgcaccaaacatcagcaagcttgttatgtaaacaagtatcacacatacatataggcactattttaagtgtacgtggatgc

SEQ ID NO: 788 - DNA, 379 bp, homo sapiens
ggcctacaacacacatctgtctgacggcctgaatatcagggcaatgatggcagcctggaactacatttcaagagttctgagttctcctgggcagccattccctcaactgctccatgctgtcatgccgtggcaacactgcattcctaacaagaagctggtccccgattctgtccctttaatcaccacccaatctgtgagtgtacaggtcgcccaattccggagcctgctgtcctgccactcatcacttcagttccgggggacctgggaagacacggggaggccacaggtgagcctgaggaggaagcaatcttctggcaacaaaatgaggctcaagcccaggcggccttgctctgcaacagtgccttgctcccgccctgca

SEQ ID NO: 789 - DNA, 372 bp, homo sapiens
  misc_feature (1)...(372): n = A,T,C or G
ccaaggccatcactggccaagcccatctaaaagccnnaggcagcaagcagtgcccgttgaaacatccataanaggtggatagaacccaaagagaaaacaaagcccaaacagtntcanntnctttactctatgcgaccaatggcatttcancctccctctacagtttgataccttcttctatagttacagaatncntaactttgttttaacctgngatccatggccacccaaaanaagagactatatttctaaaaggacttgcagtcaggaataaagggnnncgggngnnnntgttcagggngtgctctcatggggntggccttcaaannggggngtgancncaagtaaaattgctttgctaataaaaaaaaa

SEQ ID NO: 790 - DNA, 422 bp, homo sapiens
ataatagagcatggcaaattggagtcttcaattaagcacacggaatacatgtgctgaattgctttctttgcaaggttcagagtcagaattcctgccctgggttctgagttgctgagtggagacgatgatggagagcagtggagacacgtgattttcagggtgctctttgcatgcatgaaatggagcaagacttatgaagggaaaatgaaagaggaggataggaagatacgtcacctcctgggtttcctccaatcatccagtcctcatctctctatatgtctttgaacactctgagcgccatcatgccaattccatggatgaaacaaatacccatgactcagcatttttctaatgaaaacacgtgcggtctgacccgaaggagaaaccacaaacagaattgagaaaagcaggcaggcaaattt

SEQ ID NO: 791 - DNA, 379 bp, homo sapiens
gacaaatgacctgtgaggtgtgatgaaggagagagagatgaacaaaaaagaggtaatgcacagccatggatttcccgaagcccctctccttgagggctcttcttgtgctctggggagatgcgccactaaaagaaaaggctaactgttcaaggtgaaaaaacaccactccctaaaaggagcaagacttggctgcatgcagagataccaagttaaaggaattcacatcattatatctcccagaggacaaagcctagaactttctacattcaagtcagtgaatattggggagtggggaatccatgaattcattatgtggaggcaattttaattcagaagatggaaaccagcataatatagatctgtcgtggctccagccgtg

SEQ ID NO: 792 - DNA, 197 bp, homo sapiens
acctttttgaagaaatcatatggaacatgtgtcttccttcttcctggctgttataaaggaggagtatggcagaagaaccacaacttcccaactgtttggaaagctgcagctttcctttgctctaacaaaatttattgcaattaaaacactgcagcctcatcatcagatgtaattatagaaaattaactaaaaaaaaa

SEQ ID NO: 793 - DNA, 360 bp, homo sapiens
ataaagaaactgaggctcagagaggcgatgcaacttacctgaggctcagcaacgacagaatttgcacccagatctctaagactccaaggtcagtgttccgagagaagaagcacagtataataatatatggccccggtactgcggggtctccacggaagagaaaggacaatatggaaaatcttcattcaatacttaatttctcagtgcccacattccaaagcaggcacagaatgagctggacagacctcagcctgcacctccaccctgcttcttccagaaaatcacagaaataatatttcttggtaataaaataaaggcagaccctgccacttttccttccaaaaaaaaaccgcatccttt

SEQ ID NO: 794 - DNA, 519 bp, homo sapiens
  misc_feature (1)...(519): n = A,T,C or G
accctgcaattgtcaatggggtttattggtctgaatctctaaacaaagtttttgtagataactttgaccgtgacccatctctcatatggcagtactttggaagtgcaaagggcttttttaggcagtatccggggattaaatgggaaccagatgagaatggagtcattgccttcgactgcaggaaccgaaaatggtacatccaggcagcaacttctccgaaagacgtggtcattttagttgacgtcagtggcagcatgaaaggactccgtctgactatcgcgaagcaaacagtctcatccattttggatacacttggggatgatgacttcttcaacataattgcttataatgaggagcttcactatgtggaaccttgcctgaatggaactttggtgcaagccgacaggacaaacaaagaggtaggggcagctcgggggagccattccaatcatgggacacccctgtctncctcataagtgattggttcacaaataaatctgncttatcaaaaaaaaagaa

SEQ ID NO: 795 - DNA, 445 bp, homo sapiens
  misc_feature (1)...(445): n = A,T,C or G
aaaaagtctgctgacccctggtatggatgtttacagaaaaagtctgctgaacctcagtatggatgctgaccccccggtatggacctccactgtactgagggctgctgtggggaccaatatgagctgagagctctgccaggcaccctacatgatatacctgnaagggagcgtccttctgcggcctgaacctgaagctcttcagagggacccatgctgggctctgaagaaagtgactcaccttggaggagcaagggcaggtcacattccatgatgagaaattctcacaccaccctccttcatatttgactcacatcatgcagcatggacttccactccagtaaatgagtcctcatttgngggcttaaaaatctttttgttacccagctatttggntcttgncaacgctacttnctgaataaaggtctttccctgatagcaaaaaaaa

SEQ ID NO: 796 - DNA, 477 bp, homo sapiens
  misc_feature (1)...(477): n = A,T,C or G
aacaccaggcggaaaaatccattcctgactgcagtggtgaantggatncntggaatcccnagcaaggtnctggcgggcangtccttgttgngcccantntanctntgatggnggcgggagactcgctccctccacgggctccgcatangccagagcacccnantggcagacnaaggagggtgaaaccagcntgnngnggcctctcatanncgctctccctatgnacataaattgcatngaatnttagtaacacccattnanaanatgattgcgaancctttnancngangaataaactgangctaccagagattatgnttttccccangctatactgctggggggnaataaagccaggatactacccanatttgnccgacngcattactcatattcttttaccaggccccggtccaaangggggggcatggantttcgcatttnaatcaaggaaaaaaaatccttcaaaaatgggtt

SEQ ID NO: 797 - DNA, 204 bp, homo sapiens
ggaactgaacccaggagaaagacatatgattttcccaggatcacccaccaaggtgctccggactagagctcagcttgagtccctgccctggacattgtaccaggccctcaattaaagtcctggaagcttcccccaggctttcctctgagacctactggaagcgaaataatcctttaaaagttagttttctgacacaaaaaaaaa

SEQ ID NO: 798 - DNA, 523 bp, homo sapiens
  misc_feature (1)...(523): n = A,T,C or G
gtgatggttgaagctgtaacagccatcttcgactacaaaatggaagctgcatgctacaaatgacagaagacaagatcaaaagaacctgtgttcccagcaccacagaactgtccctatggaaatagacatgactgttacataagaaagaaatataccctactatgtttaagcctctgttattttagcatgtgttgtagcagtcgtatactaagtaactaatgagaaagaatattttgtgccctggtaaagatggatacttctatatgttatgagaacaatttgatgaggtaatcgtaatttagtagaataatatcaaatattaatgtcaaatgactagtttggcattgccacatagtaattgttgggcaagttattaacctgtggctcaatttcctcactggtagaataacaataacagacaatggtactagtgggcaacggtttactgaacatgtaacttggntcaacgccacacattatttggaataagtagaataaaagaggcctgagtaaatataaccta

SEQ ID NO: 799 - DNA, 273 bp, homo sapiens
  misc_feature (1)...(273): n = A,T,C or G
agataaagccttcaaataaganagaattgaganagagttgggatggcttgctcagggctgcagctggtataaagctgtctctgttctatggctggaggacacagaggagagcacacagcaacacctgcactgcagtatctcctgctaatatcatacttcataatgagaaaccacatactttctcctttaagatggaaaacaaagaaaggatgtcttctctcatcagtcctattcagcatgtactaaaagtcctactttgtgcaaaaaaaaaaa

SEQ ID NO: 800 - DNA, 287 bp, homo sapiens
  misc_feature (1)...(287): n = A,T,C or G
caagcttggaggccaactggtgaaatgggaacctaccaagatggcgggacaagggagcatggatccaagtcaccagatggaggacagactccatctaatctgcatcaggctttattcaactgatgaggaagggatgcttggtactacngcangcatcttgtgaccgancgggctggnggaccacnctaacnccntnnatanggnagngaananatgngannngaacatgnnnttttnnnatagatcacccatnnattnactaactatggaaccaccctgcctttttt

SEQ ID NO: 801 - DNA, 102 bp, homo sapiens
  misc_feature (1)...(102): n = A,T,C or G
tactaaatatacaaaaactacctggccgtggnggcgcagntcctatagttgcatntantcagagaaactgattgnagccctaatcgcttgaacctgggaggc

SEQ ID NO: 802 - DNA, 557 bp, homo sapiens
ttctagaaaactggtgtcagttacaaaggccttgaggaactccatgaaattgtcaactgcttgaatgaggatccctgaatgttctggagacaacaacataaaagcagagaaacaggtccatattcggtactcactgaatgcttgttgatgagattacattcttaagaaagatttctaactccaaatgctgaaaattcaaatctgtcaagagcggctgttgacccagaatggttcaattaactggaactccagcccttgaacattctgggtagccagaaagaattctctctgggaaaatacagggccagctcacaacaagcgtgacttcaccctgtgccccccaacactgcaggataaggacatgaagccaagtacaaatgtcacacatcttcagggagaaccaattttattctgaagttttttgggaggatgaaaattaccaacaagaatttccctcgttctaagatctgcattttccccatattttaacatttaatatctaattttaacattttaacatctaatgagatcatgttttttgcttctcaaaaaaagaa

SEQ ID NO: 803 - DNA, 496 bp, homo sapiens
  misc_feature (1)...(496): n = A,T,C or G
ttttttaaaagttcccangaaaaaactttnganagaaaacaaggntncnttttggcttttttcggtcccggccccccaaagggccnttggggaaagttgggttanccttggggccaaccaaaaattctttttggaacttccaacttgggcaaacccttcttggnccttccccannggttttcaaaagccaaantttcttccttggcccttncgggaccttcccttggaagttaaggccttggcggaatggccccaacccaacccccttgggcttaaaactttttttttggtaatttttttgggtaagaaagaaatggggggatggggtgggtttttcaacccattattttgggccccaaggggcttgggttccttcaaaaaacttcccttaaaccttcnaaaggtgggaatcccaactccccttcaagccttccccaaaaagtgggcttaaggggaatttaccaagggccggttggaagcccacccattgccccac

SEQ ID NO: 804 - DNA, 376 bp, homo sapiens
  misc_feature (1)...(376): n = A,T,C or G
gagctggggagctcctgctttattnctganctggtttttaccgggaanatgcnctntgaatgccaatttaaaaattacctggcnccttgagcaggngggtaggcaatggatgccataaccatcttgggacccacaagagaagggatagcagaaggtccacacttcccaacacaagagctctgcctgccgtttgcctgacagaagattccattattcttaaacaagatggaaggcttgggcactgaccacctcttgaaactggagaaaatgggcttctctaaggaagaaaattgggaagaattcctctttggccaccagaatggatttgagaaagaaaaggatgcagattttggcaggaaaattgcacagcctctga

SEQ ID NO: 805 - DNA, 180 bp, homo sapiens
  misc_feature (1)...(180): n = A,T,C or G
gaaagaagcagaagcagaggtagaaaagggaaatggaaaccttacccaacatcaagaagctgtgaaatgatagagggtgatattttctcaaagactcatgctgacttaagcttctggaaccttgtgggtggatgtgctaaattnaagacttgtatttaaattttctgcacaaaaaaaaaa

SEQ ID NO: 806 - DNA, 361 bp, homo sapiens
gtcgtcagaggacacgtgcaagcatttctgtagaagatatacctaaatggaaaagtgcgggttcgtggataagcacattcaacattgtgagtagacaatgacaaatgatcttctcaagtaagtgtacaaattacactctctccagccgttcatgggcgttcccatgctccatctcttcaccaatgcctggcaagatcatttagactatgatcatttagactgtatcacttttggccaagagctggggacacagtggcgaataagacacaggcctatcctcatgaagcttatattaatgggggacaaaggataataatcacataagcaaacaaataaatacatgagatgatgctaataaaaa

SEQ ID NO: 807 - DNA, 554 bp, homo sapiens
  misc_feature (1)...(554): n = A,T,C or G
cgtttaccttttttcttcctagggggaagcctaggggaagctagccctttagctcccccaccaccttttcccctagtagtgacctacctncttcacctntctccactagtggaaaagagccacacacatacacaataggggagcaagngnacacaagntagggatgnaagtaggcaaagagtacacaaagagtcacacaagagtaggaagttaccacattaggaggtcttcangcaagcttcaagccagttaagtggaaaggtgacacaggaagcacacacaaaggaaggaaatgggtngcccaaggtgcccaccaacnaaggaaaagtacgccccaagggnaaaaacccccaccaagccaagccctttttggggnggttacctttcccttccaagaggggggaaggggggggggccanaaggccattaaaaggaaattaaaccaagggggaaggttttnaaaaaaaattcccttggcttaaaaaccttaattttttcttttcggccaaaaaagccttggtgattttttaactttttttcttggaaaaggttgg

SEQ ID NO: 808 - DNA, 351 bp, homo sapiens
  misc_feature (1)...(351): n = A,T,C or G
ttcctgttctccccccaaaaaattcnccaccttccccaccaaaccaaccggnggcnccttttccccccttaattcacccctttaggtagaggtngggggccaaaaccttngggaaggttccccaacctttggttnggnggggttccccaatngggggggccccccccccccttttttcttttttnggaacctttccccccccaaggcctttccccaaggttccccccccttaaggccaaaaaggnaaccccaaggcccttgggggaaattccttgggcnttccttttttgggggaaatttnggccccaaggnggaaattcctttggcccccccaaccggtttcctttccaa

SEQ ID NO: 809 - DNA, 156 bp, homo sapiens
  misc_feature (1)...(156): n = A,T,C or G
ttccggaaatgctacattaaaattttaaaaaataaaattgtgattgttagaggtagaaatattcacaattagaaatcgcaacctcaattcaanagcttatcttttatatgaagntataaaatataggtcataaatcaaataagtgtgtttcaaaag

SEQ ID NO: 810 - DNA, 366 bp, homo sapiens
aattaaggcagagtcactgtaattatttctaataccaattccaaaatagtgactcttggacaatagtgcaattatatggaattatggctggttataagcctgtagctattcagacatatcctatacttggtgaaaaaatcacccaagatacactgtactggaacaactataagacccctgttcagattaaggaatttggtgcagtttcaaaagtagacttttctcctcagcctccatataattatgctgtcacagcttcctcaagaattcacatttatggccgatactcccaagaacctataaaaaccttttctcgatttaaagacacagcatactgtgctacttttcgacaagatggtagattgc

SEQ ID NO: 811 - DNA, 104 bp, homo sapiens
ggcagccccatgaatatgaagatacttggaaagtctttactacagagcatgatttcaggaatgatgaaacaataaacgagaatctggtattaaaaggaaaaaaa

SEQ ID NO: 812 - DNA, 168 bp, homo sapiens
ctaaggagatcaactacagattcactaaataaaggcttcaactgaagacaacacctcaacttcagcaagaatacagtagcttggtatttaccatggagaaatattatggggtctgtactatttctcttaattttatttaaaaactgaatgtgtctgtaaaaaaaaaaa

SEQ ID NO: 813 - DNA, 361 bp, homo sapiens
  misc_feature (1)...(361): n = A,T,C or G
ggagggcaggggaaatggtcagggccttcttgaagccccaaagcccaaagccattcggcattccccttggtggaactttggcaccggtattaccaccccangatgggnncttggaaagtaaacttgggaaggaaatcaccaaaaaggaaagtggaaaaaaggggncccttggccccggccttnaaacttggaatggaacattttcanccattngggggggaatttgggtccttnggccnccntttaaattggnnggtgggantananccttngggggnaaanttttctttttttcttgggggtttaaaaaaaaactccccccacatngtggcgacccttttttggaaacccccgggccctt

SEQ ID NO: 814 - DNA, 376 bp, homo sapiens
gcctcaggtttcagagggatgctgacagatgctctaccatctacccaggcttgaacagtgaagaggatgaaacagtatctgctcatctcaatagagaagacagaagttccctgattccatttgaggctcctcacctgtgagaacagtcttcttttgagttcctggaactgcagccatagtacctacctctccaactgaatggctgaaaggctgtatctgctcagctgaagacaaccatcaaggcattttttcccaaaaagcacagaaggagattcaatcatcaaatgagaggcctcactcacctctgcatattggcccttatcctttgaaagagaataaagtaacagctgctattctttcagccaagaaagggggg

SEQ ID NO: 815 - DNA, 111 bp, homo sapiens
  misc_feature (1)...(111): n = A,T,C or G
caagcttggaggccaactggtgaaatgggaacctaccaagatggcgggacaagggagcatggatccaagtcaccagatggaggacagactccntctaattctggcttcagg

SEQ ID NO: 816 - DNA, 307 bp, homo sapiens
ggtggattgctactacagttttttgagaggtggtccaagctcttcaaagagaaaatggaaccaaaatgaaaccaagactatcctgatattacaaagcatctctctggctacaaagtgtaacaaggacttgacacacatgggcacatggtggcaaagatggaccaaggcaacccttgcttggcattggagactcaggttggatctgctgggggtctgactgaaccagaaataaaagcaaataaaccactgttcacttgctgctggctaatttattcttattcagatgacttcaggaaagaaaaaagaa

SEQ ID NO: 817 - DNA, 195 bp, homo sapiens
caaaagaaagaacaacaacgaaaagatgtatttcatgcctcccattttccacttttttctcatttggaccactgcaaaaggtgacagaaccttcaagctgttgggaagaaagcagaaaaaagacttaacacagatcttctggaaatgatagaggtcactgatgctcaggcttctaacctgctagaataaaaaaaa

SEQ ID NO: 818 - DNA, 345 bp, homo sapiens
  misc_feature (1)...(345): n = A,T,C or G
gtggggtctttcaaggtcctgccagccagaggtgcccatgggccgccgcggacaggctgtgggcatctccatgtccacttgagagcctgctgcacactgtccaccccgggcccaggaggagacgaaaggccacatcctcacctccctcacggcccagctccgtgacctccctcatcagaacccggaatctggactccaacctgtgctgctgcatttcctctccccccacagccccaaacacaagatccatgaagcaagagtcacaccnttgtgtcccccagagtcccagcacactgcacatggcaggtgctcaataaatgtttgctgaatgcccaaaaaaaaaaa

SEQ ID NO: 819 - DNA, 158 bp, homo sapiens
  misc_feature (1)...(158): n = A,T,C or G
gccttcatatcttggagctggtggccttgctgttgttcattccagtcataagggctcctcctggtgctgcaagccataaaggattttacaggtcctgacacagccaccaaaggggcgnctttatcttctgntggagtaggaagcaacacctttattgg

SEQ ID NO: 820 - DNA, 380 bp, homo sapiens
acctgaggcacctaggcctgtgctgggtaaacctcagatgcagaaaggcctggaaggagaaaggcgtgttcgttttcaggagagacctggaactcgagcagatgccaggggaatcacagcacagcttgacgcagcgacagtccaaggggttcgcattctgcaagagcatgctgggcagagatggattttactcaccagaaactgaagtgacttacttgcagccatgatccggaagagaagcttcatgatgtggttttatgaggatcttgtatctccctcttacccagaagtaaacaccttcacttgaccttctgcggctccatccactgtcacacacgtaaacaccccgtccagtaatacactccaacccaaatgcagga

SEQ ID NO: 821 - DNA, 194 bp, homo sapiens
gcaaaatgatcataattcagatcctgagttaagacacagagaaggccaggaagattaacaacgaaggctccaaggaggagatgaagaaaagtggagacacttactgttcttcttagcttataaacagggcatgacaacttttcttcttgtaataaatcttatgatttttcctatgtattcccataaaaaaaaaa

SEQ ID NO: 822 - DNA, 378 bp, homo sapiens
ggttacccggcaagtttacagagagggaaggagagcagaatatttctgcccagaagttgcatcaagatgaccaagttgccatgaataaatcatcacagaattttgaactggaaaacagaaacaaaagcattgaaagctaaaatgctcgcgtaatcctttcttgattctgtgtatcacccttggagaagtctgcattgtctcttgctgtaggatgactgcatgggacacacttagtgactcttctgaagaagctttctggtctgctttccttttcccatggtttttaaagagaatctagctttcttgcccctgccttctgctaaaataaatgttaaaaaaaaactggaaaaattagtgacctacagttttccagggatt

SEQ ID NO: 823 - DNA, 277 bp, homo sapiens
ggttgtatagtcttccaatgtctgcaattcccttaatggccattagagtcgcggacgagaaaaaaactcttcagaaaacggtgtgaataatgggagcaagagaagaagttcctggttatagcccactcatatatttttgaaatataggtcagatctagaggaaatgaaagaaacttcctgttgaattttcatttatagtatgtgtctggaaatctctaaatgtaatttcttggtgtaaaataaactgcagaaatctgggatgtgtcaaaaaaaaaaa

SEQ ID NO: 824 - DNA, 291 bp, homo sapiens
  misc_feature (1)...(291): n = A,T,C or G
tgaggatatcctgcctcaactctcctgagatggngggatnacatacatgcnctnccatgcctgnattcacagancttaaaanaaacctgcctggagctcnggtagtactgggactacacgcataanccactgcacccagcctggatgatatctttganccatgaatccacctgtggactggnnngccttccncctcttatgatttaggcttggctaaatgatttgctttggcctaagagatgtcagcaaacatgatgtgagttcagtaagtgtttgcacattggcacattg

SEQ ID NO: 825 - DNA, 366 bp, homo sapiens
caggaaaagaaagacaagaggaacaaaacgacaacttgatgtgtgggagcccccatcagagccgttagtggaaatggcccctgagcaccggagcaatgttttcgacatcccaggtgctttggagtcttcgcggtgtacgggaccttaaagctgagctggctgtattgcctcgtggctgctccagtcctgtgctagacctctcgctgggtctcggggttctcagcgcctgttcagaaagcctggcaatgtttgcctgggaggaaaagctccataaatacacgctgaagacacgactctgtgggtccgtcagatgaaacacagcatcacccagcatccaccgaggagcccagtgctcatgggcaccct

SEQ ID NO: 826 - DNA, 163 bp, homo sapiens
agtgacaagtgacgacgaaagtaagacacgaatgccgggttgagttgctgaaacgctgcccacggaaggctatgcatcacctacccccacagtgtgtagggagccacaaggtgatggaacgggctgaataaacacgaatcgttttattgctgaaaaaaaaaaa

SEQ ID NO: 827 - DNA, 463 bp, homo sapiens
  misc_feature (1)...(463): n = A,T,C or G
actgggggggggctctccaaggagtccaagttcaaccaagnatcagcccctctcaagagccngcctttgtagagccagnaccaanacagcctcagngctcacagttccaccattccaagagaggcaggaagcctagnggtaggggaaggttcccaaacctagcagagngaggccctcagccagcctaggaccccccttcttccccccataggttcaggttcccgcccacnccggacccccccctngggccacccctnggggattccaacccctnggggattttccaaggccccaaggtnggccggggaattttttttccccaattaatnaaaattccccaagggggaccaaaaggggccccanaaggccttaattaaaaggaaaaaatggggaaggttccaaaaccaaggaaaaaaccttccggggcttaattcaaattttggggaaggggccggttcaaatt

SEQ ID NO: 828 - DNA, 189 bp, homo sapiens
  misc_feature (1)...(189): n = A,T,C or G
gccccaacccaaggaaaacactggttgggggcaaacncctngngngaattcaatcacnnttgggaaatctgcaaaagtcgccaaataaaagtcnggggaaattttntcttcncncatttagtttagaggtacaccaaatnngaanccaaaagggggcgccaaaaaagncttttttttaaaaataaaaaa

SEQ ID NO: 829 - DNA, 439 bp, homo sapiens
  misc_feature (1)...(439): n = A,T,C or G
aggctcagacacagaacaaatgcatgcactggtgttaaatgcagagaagagaaggtgttatctcctgaaatggattctgctttcttcggggttagaaggcctcctttttgaactgacctcaaccctgctgattttgtctcctttcctggccatgaggatcagaaatcagcaatgatttcataagtaacttctcatgaaaccacataccgcagcgtgagtcacacatgtagctctgtgcacctgtaggcgtatatgccattctttttaaatctgccaggaatgtgatgatcaactggacccagtttgcctgggattttccttatttgnactgaaaggcttggtatcctgggaaatccctcacttccaggcatactggtgtgattgaccatcccacccaggaaatgaggaagaagcaaggagtcctggagctctaccatcc

SEQ ID NO: 830 - DNA, 399 bp, homo sapiens
  misc_feature (1)...(399): n = A,T,C or G
tcccttccttcttttcttttccacagtaggtttcttctttaggccctttcccaccccttcccaccccatagnggggataggacnacnacnccacatgtaaaagnggctctctccacnccaagnataggtagagaggccccntntaggaccccttagaggaccttttccccaaggcnccttctccaaggaaaccttataagnggaaggaaanacgccacaccttcnccaaaaggtnttccttttaatataggggaagntnaatgtattatccatgngngggttaaccttggggaaggggggggccttccaaccaaggttagttttaaaagngggaagggaaaaggaaccttccccggggccaaggccccttctttgggataaaaggtaaaaaaggaaaaa

SEQ ID NO: 831 - DNA, 108 bp, homo sapiens
  misc_feature (1)...(108): n = A,T,C or G
gtgatgaaactgagggtggaaggttgantnanttggcccaaaatcntggggntggnaagngaaanatgaattctaatccaggtcttgnggactccaaaactcacgccc

SEQ ID NO: 832 - DNA, 258 bp, homo sapiens
  misc_feature (1)...(258): n = A,T,C or G
accgccggccatttcttggggggcacgngnnggaatttgggggcaaccctgcaaaattgaaanantagnattcaagggcncggcccttaaaaagaacttcaagttangnccttcccctgggacacttgccccnttttatanaaccngnnttttgcngnataaaggggacccccggggacgggttntcgnggcccgggtttgggcacacccccattctggtaaacacnttatttccccgnatgactgaatttttatgga

SEQ ID NO: 833 - DNA, 132 bp, homo sapiens
  misc_feature (1)...(132): n = A,T,C or G
cctggcctgccttaagcgaaagcacctactcccttgnctgtgtgtcctggnccaatgccngaaggctataaaagngataattganacanatcttcttggatgctgacaggaatnntagtgtgaaaggacaaa

SEQ ID NO: 834 - DNA, 529 bp, homo sapiens
  misc_feature (1)...(529): n = A,T,C or G
agctaccttgcatttangttccctgacacttgaagttccgnaactggcgtactancagccctggggnggggtcngggctttggctgactcggnaaatttggtaaagggggcaaantngccaattttcccattnggcaagggaaacgaangtggtacacatgtgcagtcacggcgaggggggtcnctcggggcttttcataggaancaaatnannggtnaaccngggtncggntggggggcnttntcnaggccttggnaaggggnaagggangggcctnangggtccagggngaaggattgttgcnaagnaactataatatccggnnngacnttcacctcgaaaaangaactgtaccaaaaaacgggnattgcaaancaagtcccctttnggcgctctcccaccggaaacnaatggnggggggacccttttggggcccnttntgngaaaatagtgctcncgctnggtgaaaataaccactggcncctaaacncanttgtttnaaggtataantccccaattatgttctcc

SEQ ID NO: 835 - DNA, 329 bp, homo sapiens
gtgaacacggcttaagagatgacccaaatggagcttccctgtagaacaagacctttccaacctctgcttgaacccttctggtaacagagaactcactacgttacaaagcctcatcctctagagtcagatcctaaggaaaggactgatcacgattttgagaggtctgatggaaatggttttctaaacttgaaaggcttaaatgaatataaaatttttgccttaattatattttctcatacaagtccagaagcatctgcagtttcttgcagccacaagcaagaggtttgaatttatgtatactccatttcttctggctgtggaacaggcca

SEQ ID NO: 836 - DNA, 101 bp, homo sapiens
  misc_feature (1)...(101): n = A,T,C or G
ggcagccccatgaatatgaagatacttggaaagtctttactacngagcatgatttcaggaatgatgaaacaataaacgagaatctggtattaaaaaaaaaa

SEQ ID NO: 837 - DNA, 269 bp, homo sapiens
  misc_feature (1)...(269): n = A,T,C or G
aaaggggggatcaaatggagtttctttcattcaagctcttaaaaggtcttgtacctggcttgcttcttgntaccatctccttggtttaaataataattttggggaaaaaccaggaaccaaaaccacttatggggcaggaaaaggtcaccaccctacccattgcccgggcttggcttggaagaagggaatttggaaattggaggttntttgccaggcctcancggtggggaattaaaaggggcccntngggncccccccaattaaacccc

SEQ ID NO: 838 - DNA, 229 bp, homo sapiens
gagatcatctaaagcagaagagaaagctgcatgaaagtgtactgagagccagttactacaggcggacgccacgccaggctaggactagggccgccggcagagcctgcactctccactcactcccacccttggggcagaggccgaattatggaacattctgtataaaggaaaactgtcttattctaaggatgacaaacaaaataaacatatttaaatattaaaaaaaaaa

SEQ ID NO: 839 - DNA, 378 bp, homo sapiens
  misc_feature (1)...(378): n = A,T,C or G
gtgtgcttcctgaggttgacttcagatcgatgtggatgtacacttggaccaagttctacattaggaacactttaagtgattgatctagaggtgcccctgctgtgaaaatggaaagaaatgtaatgttntggtcatgggananctancacttccacaataccagcacagtgagagtcatccttcatttatttcccgccttcccctttttcggatgttgatgagacattagtatggcncgaancctgtttgctccttgctgnatttattttgttaagattagagttgctaagatacggcagttatttcaaattgtaaccactgatgccagtggtcataaaataaggngctgaaattcctttatttgctaacgctaatcca

SEQ ID NO: 840 - DNA, 152 bp, homo sapiens
  misc_feature (1)...(152): n = A,T,C or G
gagagagatggaaccaaaaaagaggtaatgcacaagccattggggatttccccgnaagcccctctccttggagagngctcttcttgtagctctggggggagtatgcagccaccttaacaagnaaaaagngctaaacctggtgtcaaaagggg

SEQ ID NO: 841 - DNA, 190 bp, homo sapiens
ccggagcagatgtgtattaacccaattggacatccgtgaagacaccaaggcccagagagatcataagaacctatagaagtttccatgactggtggatgtgacagtcaagccgcagtttgtataatacacagccataatcttatctaccacttttaaaaattaaacatagatgaaatgttaaaaaaaaaaa

SEQ ID NO: 842 - DNA, 425 bp, homo sapiens
  misc_feature (1)...(425): n = A,T,C or G
tctgaagtggcctcgctgggcataaaaaanggcgcaacccnccangnannncnatttaaanggcccgccgaatncnaattcttggagggcncnccntttaaatgnccggngnggccaanccacgnntnnnactnaaccaggggnaccnggnttcaaaaggngggggnactacccanccttttgagcaaagttcagcctaggttaaagtccaagctgcaattngngcctcgcttcccatttaaaatngngcagcngccctccgtagngnaaattcagggatcccggccgccgcccatttaaaaatagagcccgcttattgngccanattcttttagcgttttttaccccttgggnaaagcaaattacttcattaaaagccaccctcttgtttattttaccccccanatcttcacaaaggaaaaaaa

SEQ ID NO: 843 - DNA, 212 bp, homo sapiens
  misc_feature (1)...(212): n = A,T,C or G
tgatggggttttgcttgcagnntaaatactgcaacatccacaacggtttgntgatgaaggaatttttttctcgagcaaaagtnataaacncaatgannacntggcttgcngggggngnnccataannctcncatgctaatgnnactgactaangaactaacgctcatntgctcaaaggcatttattttcngtgatcaagaacccatatcttg

SEQ ID NO: 844 - DNA, 231 bp, homo sapiens
  misc_feature (1)...(231): n = A,T,C or G
ggacgttcttggggggggaggctaccttggggcattaanaggtccagaaaaccttggagaanggagnaaaaanggggattggccttagaagccaaattaggcctggcctcaaggattgggaacnaaggcttaaatttaanttangcctttaaacccattgnattcaaaaacccccggaaagccccattgntcctgggggagnaggnggggtccccccttaaaaaaaaacca

SEQ ID NO: 845 - DNA, 201 bp, homo sapiens
  misc_feature (1)...(201): n = A,T,C or G
tatcttgacgaatcacattacnncccatctaganatggaatgcctggcnttgttagggcacaantggggtntccaagctgatnatttgtccctggttnaagggacttctggatacacccagggngataggcccactangaaaaaacctggaggcacagaggggaataccccggtggtacttccacaaactttttttttcaa

SEQ ID NO: 846 - DNA, 244 bp, homo sapiens
  misc_feature (1)...(244): n = A,T,C or G
caagccttaggccaggaatggtgcnagaaagtttaaaggtggtggggntttcantgccagaaaacctttnccaaaatggggattttcaaaggaagccccaaaagcccctttcaaagaaaagttggggtggtcattttggtccaccttttgggnaaataatgtttttggtattttaaattaccnngggtaaggnaatantggtttaaattaaaacccattatttcntttattccaaaaaaaaaaa

SEQ ID NO: 847 - DNA, 196 bp, homo sapiens
  misc_feature (1)...(196): n = A,T,C or G
tgtgaggaggatctctgattcccgccntgacanannaactggaaatgaactttncttcttaccataaacagctattaaactgggagaaaatatccacnacncatatgtctcacaaganacttgntccagaattcttaaagaangcnttcnatnattaaatgacnaaaattcccatttaaaaataccaaaaaaaaaa

SEQ ID NO: 848 - DNA, 286 bp, homo sapiens
  misc_feature (1)...(286): n = A,T,C or G
gccacctggctttcccacacatcaacctcgtgctcacaccccactctggagaccaccagcttcgaggcaaaaagagagaacgacgtacaatggggtaaagcctccatgtgtaggcgatgttgtgaggaaagggtggccggttggaagggaacatttttaaattgaggttattgtttatattttctcataaacagcttctctgtggccacaagttatttcggtcattttcacaggctttttcccccctttcccaagnaatttaattcccttggggggaaaaaaaaaa

SEQ ID NO: 849 - DNA, 360 bp, homo sapiens
  misc_feature (1)...(360): n = A,T,C or G
gcagaggaaatgtaggaagcacttagacaaacatgtgcaatcttcaagagagttcccttgacattttgctgacttttacaactgtgatcctgagaggagaaaaggagtttttgttcacaggtggactcactgaaacaccagccttcagggaagcccatgggaggtctttccttnncgggtcccatttgcctagcaggagttccctaatgggcctacatcacctcaggcctaggccggcttgtggcttgcttgccatccagtagcaaggtcacgtgggttgnggcatcattagttacaagctgcaatacaaaataatagtaacaaaggagatgggggaatttccacatgcatcacaggtag

SEQ ID NO: 850 - DNA, 394 bp, homo sapiens
  misc_feature (1)...(394): n = A,T,C or G
gcgacaccgtgttgggtccccgaccttctatgctgagcagcttaggggagggtaagttgccccaccacacctggtgcagcattcaacaagacacccatccctttaattattcagccaaatgatttatgaggcttggcagcaaagacttggcagactggtttaaattcaaaggatccaacctacaggtattttgaaaaccttggccacatctgcaatgtgtactgtttcttttgggagaggaaagaagagaaagggagaagatgtgacctgcctgacaggaagacaagacccaactagatggaacatgtctcccactccctccccaccctgtcatttaacaatgntctggctgactttcttcctacgaaaagcaatcagatagagttttaaagat

SEQ ID NO: 851 - DNA, 101 bp, homo sapiens
ggcagccccatgaatatgaagatacttggaaagtctttactacagagcatgatttcaggaatgatgagacaataaacgagaatctggtattaaaaaaaaaa

SEQ ID NO: 852 - DNA, 207 bp, homo sapiens
  misc_feature (1)...(207): n = A,T,C or G
ataaaactggatgtgcgagttcnaaggtctacattttgcaatacgagagaacagctgaattgaactanggagacatgaatttgtcatgaataaatcttgcanaaggactgtattcaaactatggagatatgatatacagtgaatatatttgtggttagcaaaatgatgttacagntttatgataataaatttcttacaaaaaaaaaa

SEQ ID NO: 853 - DNA, 150 bp, homo sapiens
gagttggtccaccagtggaaacatgctgaatgaattatccccctgagaaaagcctcaagaatgacacagaaaattaagatgctcttaattaaaatgaatgtgtaccagaatgataataattaaatttcatcagtctgttaaaaaaaaaaa

SEQ ID NO: 854 - DNA, 226 bp, homo sapiens
gtcccaccttacctggaagaaccatgaagatcaaatagaaggtccttgtgcatgaagctcagcggaaaaaagctcgggtatgaggcaggggaaatgtagccgaacaaagcactgggaagaacagtcactttgcaccttttgtatcaaaaggaagcaggtctagggtggatagaagacattcatcaaaactgtgaaagccaactctttattacttgaaaaaaaaaaa

SEQ ID NO: 855 - DNA, 135 bp, homo sapiens
  misc_feature (1)...(135): n = A,T,C or G
acccttgggtgtagactacctggcattaaggtcaagnaactggagggaacngggangcccttctccacaacanntctggggatgcncctnggnccttaccaagcatgggcaacntacaactggctctcacctgat

SEQ ID NO: 856 - DNA, 375 bp, homo sapiens
gtttcttcctgaacgcgcctcagcgattttaaatcgtatgcagaatattcaatttgaagcagtggttggccacaaaatcaaaatgaaatgaataaataagctccagccagagatgtatgcatgataatgatatgaatagtttcgaatcaatgctgcaaagctttatttcacattttttcagtcctgataatattaaaaacattggtttggcactagcagcagtcaaacgaacaagattaattacctgtcttcctgtttctcaagaatatttacgtagtttttcataggtctgtttttcctttcatgcctcttaaaaacttctgtgcttacataaacatacttaaaaggttttctttaagatattttatttttcca

SEQ ID NO: 857 - DNA, 348 bp, homo sapiens
  misc_feature (1)...(348): n = A,T,C or G
ggcgcgccggatccgaattcctcgagggcgcgccntttaaatggccagngaggncaattcanntngtgacttaaccannntgaacaccgntttatgaaggtggggactccncaacctntttgagcaaggttcagcctggttaagtccaagctgaaattggggcctcgctggccatttaaatgggcggccgccctcgagggaaattcaggtatccgagcagcgccatttaaaatgngccgctctagtancatatctctattgctagattgttaccctggggaaagaaaaatactcataaagccacctctgntgtattttacccccnaatctttcacaaagggaaaaaaa

SEQ ID NO: 858 - DNA, 144 bp, homo sapiens
  misc_feature (1)...(144): n = A,T,C or G
acacaacaccatgcggaaaaatccnttcctgactgcaactggtgatactggatgcatggaatccccagcaaggtcctggctaggcacagtncttgttgggcccnatnaancaangatnnnggncggtagactcactccctccac

SEQ ID NO: 859 - DNA, 170 bp, homo sapiens
  misc_feature (1)...(170): n = A,T,C or G
cttccctcaacccctcaaagcagcaagatttatgcaagcctcctgtgacagcagagcttctgtcccatcagtagccttatcaaatctgtcctatagccccatcanaactggacgaacanctggcttttcnaggtattaagaaccccnntttaaaaagggccctggtggat

SEQ ID NO: 860 - DNA, 249 bp, homo sapiens
  misc_feature (1)...(249): n = A,T,C or G
taaggtgggggactccccaccctttttgngcaggtttcagcctnggttaagtccaagctganttggggcctcgcttgnccattttaaaattgggcggcgccctcgaggggaattcggggntcccggcgccgccntttanaantngggcccgttttggggccaaattcttttgtgtnnccnttacctttggggagaanaaatntnctcattaaaccncactcttttnttttttntcccccattttttttc

SEQ ID NO: 861 - DNA, 265 bp, homo sapiens
  misc_feature (1)...(265): n = A,T,C or G
ttaaaacccgctttcaannaaagttnggggaaaacttcccnnaaccctttttttggaancaaaggtttcaagcctngngtttaaaagtcccaaaagcctttaaaatttgggcccttcgccctttgcccatttttnaaaattgggccgccgccccttcgaangggaaantttcggggattcccnggcgccgccanttttaaaaattgggccccgcttttttgggncccaaaatttcnttttttggcgtttttttttaacccttggg

SEQ ID NO: 862 - DNA, 579 bp, homo sapiens
  misc_feature (1)...(579): n = A,T,C or G
atcatttccagagacgatggtgatattggaaggagacgattacccatctctagtcctgacccttcactcaagccccactgctgcctcaaacaatccatggccatggcacctcaaacctctcctttgcatcactgtcagagctgtccagatgggttctgcttggttggtggattcgcaggccttggactgtggggctgactcgagataatttccatacgccactgagcatttttactgggaagcgtttctttccttctcctggatgatggtgttatcggacttgtatagattaggagggagaccttaggtttcagaatcagactgaccttaattcaagtccaagctacccactagtattgggcaaattattgtactcagagtctcataacacacaactcacaaatatgttagcaaaaattagatacacgtagataatgccacaggaaacgtggcacataggaagcattaaataaattttttctcttctattaaaaaagaaatgttggtctggttacgnttacttatattttgcatttttttctctaaacttacatgngggggcagaggggttccaaccga

SEQ ID NO: 863 - DNA, 354 bp, homo sapiens
cctgtgttgaaatctccctgaggatgactcaccatgccttttcccaacatcaggcccaggaagccacggactttcccatgtcatcactgacttgcaagcctggggcaaaaccacagtccacccagcacagaacttggttctgcgaccagaaccaaagatgaacttgtaccctaggaagatgtggtcttctaagcctgacaaaggacgccaattttccccattcctctctcttaattcataatagaagggtttggttaattacacctgggataatgaataactaaaaatgtgttcttcgctacgtaaacagaacacattctctattcatttacagttaacatttcaactaaattt

SEQ ID NO: 864 - DNA, 247 bp, homo sapiens
  misc_feature (1)...(247): n = A,T,C or G
tcccaacctcttttgaagacaagattcancctggtttaanatccaagtctagaatgttgcntcntcactattttcatnttnaaaatgagtngcgccctcgnaggtaattcggnatcccggccgcggccatattaaaaatgggcccgcctatgnggncaaanatctattttggctttttttacccttggcaaggaaaatacntcattaangccaccttctggtntatttttacccccccaatctttca

SEQ ID NO: 865 - DNA, 235 bp, homo sapiens
  misc_feature (1)...(235): n = A,T,C or G
ttttaccagaacgacccatgctttttcaggattgtanataatatttcagnatatattttatgacatgactttgaanacgctgaagactnncnctaacatanttncangnngggcccngnctaagantgnaaggaaacaccccangggaggaggcnagcnaagggattcattgncctgcacgtttnacagggggncagnncctgcccacgcctttattttaaaattctaaccttca

SEQ ID NO: 866 - DNA, 249 bp, homo sapiens
  misc_feature (1)...(249): n = A,T,C or G
cctttttgaggttctcttcagnccnggataagttccaagctgcaatnaggccannccttttgctgnnnaccctggnagancnnctcataagccacctggtgttatttacccccgatacttcncaagcaaaactgttactganantttgctttnccgcactgganccggggccntacngacaaaatgtatgangaatttagcatgggngttgaaggccctttntnnaaacacaaacacgagacaaacaag

SEQ ID NO: 867 - DNA, 325 bp, homo sapiens
  misc_feature (1)...(325): n = A,T,C or G
agtctttacactggcccatataaaaagngnggaaanaacgggnnnntttnntcctntnttttttttttttcccccccaagggnctttgggaaaggnngcccaagngngaatnggccaaaatttctnngggggttttcaacccggccaaaatttnttccccgccctttntttcggggggttttcaaccgccccatttttnttcccttggccctttnaaaccctttcccaaaaaagccaagcnttgggggnaacttaaccaagggtttccttggcccaacccaacggcccccgggcttaaaatttcttttgggaaatttttttaaag

SEQ ID NO: 868 - DNA, 364 bp, homo sapiens
  misc_feature (1)...(364): n = A,T,C or G
cgggctttttttggggggggcaacacntttntggggangcaaacncaaaaaagnggggggcccaangtggggccctacnccntcccctttttttcncctnggaaaaaaaanggcntgggggggaaacctcncnggggagnncccgttntggcccctttaattccaagncccagggggaaaacngggntttccnttttcntttttnggggnaagaagtttccntttttcccaagcaantttttccttcccaaaaatccccccccccccgcttttttaagngggnccctcttnggtcnttattaaaaacccatttttaaggtttttnaaggccccccnaaaaanattttttttttttcccccctcc

SEQ ID NO: 869 - DNA, 375 bp, homo sapiens
  misc_feature (1)...(375): n = A,T,C or G
agctacctggcatttaaggttcangaactggntttttttntngggggcnaaaacattcttttggaagccanaccaaaaaatgggnggggccaaaggtttgaaaataacncncggcggggggttcttttttancattctttaaccccaaggtaaaccaacccccaaaggcttttttcaagggaatttgggcaaattaaaatttcttcaccaaaccaatttcaattttttattgnaacaatggaattttttggaaaatattggtttggaaaaaactttaacttcttaaaccaattaaaattttttcaaggggaatggttaccccttggtttttttnaaaaaaaatttaaaaaaaggggaaaaaagggtccttcccca

SEQ ID NO: 870 - DNA, 428 bp, homo sapiens
  misc_feature (1)...(428): n = A,T,C or G
cccccccccctttccccccttttttttttttttancaaccggngggnttttctttttttgggccccctttttcnccaccccctttcncacccctatngggggggagtnggncccccncccccaaaaggaaaaaggggccctttttncaccccaaaaaatgggngggggggccccctttttggaaccctttttggggaacnttttcccccaaaagcccccttccccaanaaaaactttaaanggggaggaaaaaaccttaaaccnttccccaaaaggttttctttttaatttnggggagggttatttttttaaccanggggggtaancctngggnaagggggggggccttccaccaaaggttanttttaaaagggggangnaaaagaaacctttncccgggggccaagggcccctttctttgggaaaaa

SEQ ID NO: 871 - DNA, 206 bp, homo sapiens
  misc_feature (1)...(206): n = A,T,C or G
aagacactctctataaacctatataaaagggngcccctttccttttanatttcccnttttttttanggngccccccattcncctaaaaaaaattccaatagttttttcncaacccnggaattntgcccnaantntgntttnaatncgaccccggaccccaatgngttaaaaggggtcacagaaactgaaaaaaattggggtcgggg

SEQ ID NO: 872 - DNA, 465 bp, homo sapiens
  misc_feature (1)...(465): n = A,T,C or G
acccatctgtagatctgacccttaacnnaagccccactgntagcctgnaacaatncatggccatggtnccnnaaacctttcctttgnatgactggcngaactgtgcaccaatgggtctctgcttnncnggaggatnnncacnccntngactgtggggctgactctagataatttccacacgccactgagcatttttactgggaagcgtttctttccttctcctggatgatggtgttatcggacttgtatagattaggagggagaccttaggtttnagaancagactgaccttaattcaagtccaagctacccactagtattgggcaaattattgtgctcagaaggtctaacacacaactctcanaaatgttccganaaatagatacccgccanaangctcacacgaaangcngcgcatannaggcntttaataaatnntttctcttctattaaaaaagaaatggg

SEQ ID NO: 873 - DNA, 676 bp, homo sapiens
  misc_feature (1)...(676): n = A,T,C or G
ctggggggaaaccttacccttgccntttanangtcaagaaacttgganngngtcnccttgnattggggccncggggttgaaccatttatcttcaacaagccngcttgngntgtgtancaacgccggggggtcttggcaancgnaaccaccccaaaaanaaagcccgggaccttcttgacccattgggtgntccccttgggngccttggtggggccttttttgttgggggcccccttggttggggttaanggaagggccttggggttaccaaaagggtttttttgnggaattccggggttttccattcccccttggggccaaccccaaccccaaaaaagttgggggatttggccaacccttggaaaaaaggaaaagnaaatgggtttttggtnttggggggaatttcaaaagggggggggggggccctttttttggccccccccggtannnttttttttcttaanagggccttggcctttttttcctttcccccccaacctttggggttaaagngggggggccccaaccttttaaaaatttggggggaaaccttgggttccaaaagcccccccaaaagggaaacaaaaaactttgggggggcccccaaaaaaaacctttaaccaaggccgnggggggaatttttaatttccccttggaanttggcccccccttttta

SEQ ID NO: 874 - DNA, 275 bp, homo sapiens
  misc_feature (1)...(275): n = A,T,C or G
ctttggagcccctgcantnctcctgaantgagggctggtancaatgaacctacagtgaggcagagaagaagaaanggaaaataacctgtgggttcttttacatcttaacccagnnncaacccaagctttttcaggattgtcaataattctcacaacattcattttatgacatgattttgaatatgttgaaacttactctaacataatttcaggatgtacctgtttaaaaataaaaggaaagtctccagggaaaaattnntttttaaaaaaaaaaa

SEQ ID NO: 875 - DNA, 415 bp, homo sapiens
gaaacaggttgagacatcacacaataaatcataaggggtagagagccctgccacagaaggaggcctgggttctaaacatcatggagaaggactttacccagcctcagtgaggggtggtggaaaagacgaaaatcaggaaacatttcccaaaagaaaaatgagattctctgatggaaactggaattgagcagagcaaagggatgtgttgccagcagagttgattaggctacaggtcattggaagaacatatttagaagaaaccaaagctagagtgaactccaagtaaacacccaaggttactttttttgtccactgcaagtgcacagcattgcaggagctagcctccgagtgccaagctgctgccattcctgtctcctggggggccgattctgcctttccagaagcaacacagtgg

SEQ ID NO: 876 - DNA, 192 bp, homo sapiens
  misc_feature (1)...(192): n = A,T,C or G
gatgcagacatccccctactntgggacttgaaaggttcgggncagggngccnagangccanntattttnncccagcttgaaggtcaagttntacagggtttctggccanaanaaccaactccncnttcaaccaggaagcccaagagagctgcatggagagaagggcctgtggaagagccctgaggtgccact

SEQ ID NO: 877 - DNA, 358 bp, homo sapiens
  misc_feature (1)...(358): n = A,T,C or G
ctgcagtttgctggaagttaacntgaggaacactattgtgatctaggggaactctaatncaagngtgcnataacanttataaatagcgatgcctgntccttcatnctcagnctncatatccatgaggaggganacagcaacgtacccactggaagaacacnctacactaggtgaacgctgcccngcacataaacctggttcagatactcggcaataggaagtagggncccaccatcncacagaatantttgtgagaggctttgnatatgtggcngcancaatngcngatnctgcttcanctcgacgccntatgccaatgnncactntngctcnatncagcacctcttgatgtttacac

SEQ ID NO: 878 - DNA, 391 bp, homo sapiens
  misc_feature (1)...(391): n = A,T,C or G
aggcacttccagaaacatatnacnnttgacagttttaggctgactgataaaagtgggcccagcgtctcggaactatttgaaatgctgcaacagcaactacgcaggagtttccttaaaggagatctagcgttatatgaagagacagcttcatagctgatcttactgataaggatctccaccttataggagaacactctgcaaaagtgagaagagaaggcacctattatcaaaatccatccagccataggtgctgtgctcacattgcacctgtcgtgngacatggnggcttgcccatgcacacgaacctgtggcactgaaagaccggggcaggcagtgggcttcagtattcttggaatcctgtgtaatagacagcacttcctgggggctgcgg

SEQ ID NO: 879 - DNA, 112 bp, homo sapiens
  misc_feature (1)...(112): n = A,T,C or G
tgcgttaataagatatcanactcattctttcttngttnaagnannggganaaagagaaangttttggggngtggccctgcttgaaatctcancagactttacactaaaaaag

SEQ ID NO: 880 - DNA, 370 bp, homo sapiens
  misc_feature (1)...(370): n = A,T,C or G
aatatgttcaaactcgggacagtcatccaaaggtgggtaatccncatnatnggnggagcccctatccttacctttgcccacntcctcngggatgtncngcttgcnctttgccattaaaggggcccattaaattgggttanaaagggtnggtggggattggaaaagccaaacccattccatttggaccaatttctaaaccttaaaaggccggaaaaaccaaattggcacaaggccggttcaaaccaaggatccaaaaaaggccaagccattattctcccaaggggaaaaaccaaggggaaaaaggcccccctgggnattggaaaaaccacctggaaagnaaaaagcncctttaccagggttcaccctttgg

SEQ ID NO: 881 - DNA, 190 bp, homo sapiens
  misc_feature (1)...(190): n = A,T,C or G
ctgaggctcagagaggctntanaacgtacctgcagcttagcatagtcctgaatnggcacctcanatccccantgaatncatagggtcaatncnatcggngcntggtaaccacatgaagtaatngtttaatntcaccatacnntttgacatgcnaccttttggagncatagntgccgttgcgatataggcc

SEQ ID NO: 882 - DNA, 156 bp, homo sapiens
  misc_feature (1)...(156): n = A,T,C or G
aggttcactccagaacctattngtctgggtatcaccantgggaggctgngagancagcaaagatngctctgcctgcnccttccttcgggaggcttcatcccananagggcnccctgccagatgccanctggagctctcctacctgggaacctgcca

SEQ ID NO: 883 - DNA, 281 bp, homo sapiens
  misc_feature (1)...(281): n = A,T,C or G
gaactgaggaaaacttctttgcataaccatgaaggactgctctctatgatccactcaccccatccacaggacacgaagcagcggggaggagcatactcaggtcacctggaaccgatggtgtatctccagggtcttacaacagcnactggctcatcacgggtattcaggatggctgacaaagtctggaagacactgaattccagcctcaggagtatttttcatctgtatgctccctgntgtggctaanaaaaaaacgtgtgttttcatggtaaaaaaaaaaa

SEQ ID NO: 884 - DNA, 219 bp, homo sapiens
  misc_feature (1)...(219): n = A,T,C or G
gacatatttccagggagtaaaacccaagagatcagcacattttggaaaaaggtttttcaggctgcttttctaaaggttnataccaatttaccctcccgccagcaatgtgcaaatgttgtctagttcaccacactatcaccagcatcaaatgttaggatattttattttttccatctttgagtattttgtaaactaaagaactttattttcaaaaaaaaa

SEQ ID NO: 885 - DNA, 414 bp, homo sapiens
  misc_feature (1)...(414): n = A,T,C or G
gaactcccttgtcgtttnaagctaccaaactngtagngctaaattnggagactntgcttngnaaggatnccctttccanaaacctattttggggcgnggggggaccaaccccngggggaaggncttgcncttanaccgncaaaaccattagnctctngtgctcgcttnctttctttcgggaggggctttcatttgcccaggaaaagagnnnccttgccaagnaatgccccntcttgtgaaaccctttcttaaactngngnggaaccngcccttgactaaaaacccttggggntntgctnggtaaaagaaacantgtcccaacatntcnaanaaaanttcgantgttttggattttggcaagaaccatgcccaatcttttttncttggcctttcatngggatggtgcttttacac

SEQ ID NO: 886 - DNA, 135 bp, homo sapiens
  misc_feature (1)...(135): n = A,T,C or G
gtcaagccctgggaactgacgccacaccgncantagancggccntgacttatgtgnatnatntctggacagggcttgcncatggaggannaaacctcccttttnctcttgtttcacgctgtcctcttggccttcc

SEQ ID NO: 887 - DNA, 247 bp, homo sapiens
  misc_feature (1)...(247): n = A,T,C or G
tgttaacccttttgagcaaagatnagnctggtgtaagtancaagcttnaantgggcnccggtgggcaaattaaanggggcnccctngaggaaatcagnattcngcgcgccnttnaaaaggccgntatggccnagatattttgctttttaccctggaagaantacttatnagcccctttnttatttacccccaatctttanaagaaaactgtgnnnccttcaantgtggggacatgaaaggctttata

SEQ ID NO: 888 - DNA, 235 bp, homo sapiens
  misc_feature (1)...(235): n = A,T,C or G
ttggataaccatgaaggactgcnctctatgatccacttnaccccatccccaaggacngaatcaagcgggaggaggcatactcanggtcaacctggaacccgatggtggtatctccagggncttacaaccagcaancctggctcatcacgggtattcaaggatggctggacaaagnntggaaagacactgnaattccagcctcaggagtatttttcatctgtatgctccctgttgg

SEQ ID NO: 889 - DNA, 365 bp, homo sapiens
  misc_feature (1)...(365): n = A,T,C or G
gatgcagcagaagcgacgctgtgtgacttccgaggctgaggctgcagagatttgaggcatctgctctcacccagcttgaagtgcttcctcttggaagccagccaccgtgaaaaaccccgccatgcttgtgaggaagcccaagagagctgcatgggagagaagggcctgtgaaagaaccctnnnggtgncnctcacatgaagtgaaccctttggggncnttcnanccnactnccnacaaaaacgcaagcagcgagtgtccccagtcaacgctttctctctataggagacctgtaaatggggtggcggggggagcaggaggaattttctgatctcacacactgttatgagttgaattgtctccccac

SEQ ID NO: 890 - DNA, 135 bp, homo sapiens
  misc_feature (1)...(135): n = A,T,C or G
cagatctcaggagatatttttgatctgnatgctcgctggcctggcctnntnnaaaaancgtgngattncatgggagagccatnacacccanncgncacagccgcttttaagcatatggttgatccatatgggggc

SEQ ID NO: 891 - DNA, 188 bp, homo sapiens
  misc_feature (1)...(188): n = A,T,C or G
ccttttttggagcaaagtttcaagccttggttaaagtcccaaagcttgaaattggccctcgcttggcccattttaaaaatgggcgcgnccccttccgaagggaaaattttcgggaatnccnggncggccgcccantttnaaaatggggccngnttatttgggcccaaantcntttttttggcgttttt

SEQ ID NO: 892 - DNA, 150 bp, homo sapiens
  misc_feature (1)...(150): n = A,T,C or G
taattcttctatcttttttctttttcttttantcatagggggggntgctgggttatagtgntatctnaacatactattttntccncgtctatagtnntntnnttctaaanccnctctcacattccactcnttcacacctttcctgtatat

SEQ ID NO: 893 - DNA, 102 bp, homo sapiens
  misc_feature (1)...(102): n = A,T,C or G
ctttctttttttctttactccttaggngggctnatctnnacctatagnntctantatncacttaaaatcccggttnattgataactactattaaataccccg

SEQ ID NO: 894 - DNA, 187 bp, homo sapiens
  misc_feature (1)...(187): n = A,T,C or G
tgcccaggaaacaaggcgcttcaccaagaggttggaccatgcanggaagnattctctgctagaacactntanagacagnanggcnttgctgacntantggattttggacttctggcctttaggaactgcagagagaatacattgactgctgtgttgagccacccaacaantttgtgacaggaaccct

SEQ ID NO: 895 - DNA, 335 bp, homo sapiens
  misc_feature (1)...(335): n = A,T,C or G
aggaggacatgaaggctcaggttgcccaagaaagtccagggtcacatggttgattcatctaaggccagtgcctgagtgccctccattgaacaacactgctaggccagaagtcactgaggatgactgangcccnggcaagaaagggacaagtcagagggctgagatctggaagacagagtgtgtcctgcagcctcaaaaacccctgattcactcttcggctctcccctcaaccttctgtacccttatgctttgggtgnatctcttgtaaccccacaattgggatttgntctttatccattctgacaatctttatattttaatagggagcatttaat

SEQ ID NO: 896 - DNA, 155 bp, homo sapiens
  misc_feature (1)...(155): n = A,T,C or G
accttaggcaccaggaactgnatacataccctagancanngacttactgagnttccttgatggnatttttgagctggatgntncatcangntattnatactacttaacgngntatattaanctgggcacggctnggccatgggatgacactccta

SEQ ID NO: 897 - DNA, 293 bp, homo sapiens
  misc_feature (1)...(293): n = A,T,C or G
acccattcatttggtaaccacagacatcttatgcttttcaaccctaaatggtttacgtatctgatccagngacttnaaatcccattccaccgtctctacccattcaaaccccaggactttgtcaagaccattcccattctttgtnctttgttacatgncncgncttccgatgctcctcaccctcccatccgcctctgctctcggaccttncagagcttggagcagcgtttccctccttcgaacataaagaacaacctgtacttactgtgctgctcctcactgaaaaaaaaaaa

SEQ ID NO: 898 - DNA, 128 bp, homo sapiens
ggaacttgaaaatgacacagagagaaatgcaagtggcaataggatccagaaaccgagagactcatggaaaggaggcagccggtggaagcaggagacagcagaagccaagccaaacagcaaaaaaaaaa

SEQ ID NO: 899 - DNA, 351 bp, homo sapiens
  misc_feature (1)...(351): n = A,T,C or G
cagtttgaatatgtcatcccactgcctttggccttcatagcttctggcccacgaaagggaagaattacatgaagaccnccacgggaaaaggggagcccngggggaagagggtttcagaagccaaccaaaagcctggctggatattnttggatcttgggggtctaaccctccnagaaccggtggatgaaaaggtnggtnnttaancccntccggctnggggattggggganacnagtctaagncanactnatngcaagcctngcncaaaccttttgcnatttaantcttttttctcaagcatnnattttttctcccgaatnagcccttattantcaggggaggaaaattaaa

SEQ ID NO: 900 - DNA, 330 bp, homo sapiens
  misc_feature (1)...(330): n = A,T,C or G
acccatggagaggggagccaaggggagaggttcaagaancaacaaagnntgctgnnatcttgatcttggggnctaacctncaaaaacggtggacgaattagtgcttgtgnatttaacnccattcaggtactcgtggtgtgataagaggtgacaaagcaagtctanatgcaaggactagatggcgaacgctcctnggncaacaagnactttatngccaatgntaaatttctnntttgtctcangtcatggcatatnttcttcctgcccgtaanttacaggctncgtaaatnatcagnnnggntggaaaccatccatacatggtggttaaaa

SEQ ID NO: 901 - DNA, 106 bp, homo sapiens
  misc_feature (1)...(106): n = A,T,C or G
atgcaacttacctgaggctcaacaacagacagaatttgcacccagcatctctaagactccnaggtcaccagttcccagagaagaancacactataaggggtatata

SEQ ID NO: 902 - DNA, 116 bp, homo sapiens
  misc_feature (1)...(116): n = A,T,C or G
aaccactgaggaggagcactcacatgaaagtgactggaggggaacgattcacagtctacaatagccngccaaanatcatgcgccaccctnaatacaacaaagggactcctctggta

SEQ ID NO: 903 - DNA, 196 bp, homo sapiens
  misc_feature (1)...(196): n = A,T,C or G
caagagctagtccaaggatagagagttctagcttagagttaggtagagatctcngccaagagccttagaggactagtagagagagctagcacctccgaggattaattttccaccaccgccactaggagccatttttttacctagnggggaaangacagtttctttttccttttcttcctaggggataggatagggt

SEQ ID NO: 904 - DNA, 197 bp, homo sapiens
  misc_feature (1)...(197): n = A,T,C or G
atactctccttccccattnttagatgacnatnctacntgctctactcgggtngntaatnttacntttnnagtccnatggggnatctacctagcatttaagtnagcaactgcaggtatgcagcagaaagccgacgctgtgnganttccgagnatgnggctgnagagtanttgaggcatgatgctctcacccatctatg

SEQ ID NO: 905 - DNA, 172 bp, homo sapiens
  misc_feature (1)...(172): n = A,T,C or G
gcgagaacttttaatcagtaaaaggngttcaanaactcagggaaggacatgggaagacatcctggggtctncccgtttaacattggacctgtttccttgcaaccttaanggngncataagcncttngaccaccttaacccantgggnatttagtgcaccccggattaaattt

SEQ ID NO: 906 - DNA, 163 bp, homo sapiens
  misc_feature (1)...(163): n = A,T,C or G
tagtcctgaacctctcngntttttgcccactgctggcctcaaacaatccatgngccatagagcacctcaaacctcttcctttgcntcacatgcaccancanccnggtgaaaatatantngtatatttntatgggagnaaggacaggatttccgccaagagccc

SEQ ID NO: 907 - DNA, 221 bp, homo sapiens
  misc_feature (1)...(221): n = A,T,C or G
ggctcacgcaatcgacagaatttgcacccanatggtctaanactncaaggtcngtgttcccagagaagaagcacagnattactagtatacggcccacagtnctggaggtagatctctcanggattgagaaaggacnatngggaaaatcnncnttcaanactnanntnntcantgcccacattccaaatcaggcccnccaatgagcttggacaagaccttga

SEQ ID NO: 908 - DNA, 136 bp, homo sapiens
  misc_feature (1)...(136): n = A,T,C or G
aaaacccataccttcgcanaggtgttcttttattttggggaaggcaatttttacccagggggttancttggggaagtgggggcntcnaaccaagatattttanaagnggaaggaaanggaccttcccgggccaagt

SEQ ID NO: 909 - DNA, 264 bp, homo sapiens
  misc_feature (1)...(264): n = A,T,C or G
tcttaagaaaaattttttttncattatacccttgnaaagnacatgtttctctatgaaaccacttcaccccaatncanaaggtaccananatgcacgnttnntaggatccttncttcangtcaccatttgcacntcnntgttntcanttntncctnttncttttcaatnagcangcttgncttccatcaccggngtaattcangagattgggcttgaccaaaaggtcttggggaaagacacctggaaattcccacctctctagtg

SEQ ID NO: 910 - DNA, 193 bp, homo sapiens
  misc_feature (1)...(193): n = A,T,C or G
tgggtataggagacagttaaaaaaaagaccnaaannggcctctgggnccatnccagcttnctctanacnngnttnntnttnttaaaagggggnggacaaccctaaaaatggccgtcggtaaagtcacacagcctggagctccacacctgttcctgggaataaacaanctttgctttgcttttaaaaaaaaaaa

SEQ ID NO: 911 - DNA, 182 bp, homo sapiens
  misc_feature (1)...(182): n = A,T,C or G
gggggggtaagacctaccccttggncattttanaagattncaagccaaaacttggnagngngaagcgccaccaagannggncnccaatacccttntctnatccgaganaaagcaattggccccggcccatccccgagggncctcccccatcnttcttgcaaaaggcccgggtgggacaaaaa

SEQ ID NO: 912 - DNA, 178 bp, homo sapiens
  misc_feature (1)...(178): n = A,T,C or G
attaccttaatatgcccnacatctcctngccaaagacaagtggacttatgaaccaaattcgttcatttgcacgctggaaatttcgctnntttcactactncnagaacacagaaaccantttcttgatntcaccgccattatcattatanaaaggggataaccattagacctacaataa

SEQ ID NO: 913 - DNA, 192 bp, homo sapiens
  misc_feature (1)...(192): n = A,T,C or G
gctgccaatatccccgaaggaaagcntaaaaacggaagntctaagcccctangagggngcggaaacgggactggcccanaccttgnaggcnagccntgngagggaccctgaaccagagacccagactaagccttgctcatattcctgacccatgggnacaagngagaagatnaatgggtggtgctttaagcc

SEQ ID NO: 914 - DNA, 171 bp, homo sapiens
  misc_feature (1)...(171): n = A,T,C or G
gcacgcttgcataacggagcaatgatnnngangtccancttgaagtccaccatggatttgnngcngccttgctggctcagaananggaggccttcatgtgnnggnacccatctgggccccttgnttcaggacttccgggctcccaaagactgnagaactccaacctcctga

SEQ ID NO: 915 - DNA, 606 bp, homo sapiens
  misc_feature (1)...(606): n = A,T,C or G
tgaggatggtcaaacctctggagcngncaacctgctgccgtngtgttncctntnngacattncacccattctcttgangaanggagacaanatnnnacacnnggagatagggnganatttggngacaaggaatgtgnnccncaccccctantgcccanatctntcatagggggtntcaagggctttacaggcactgggttaggtatggggagcccanaccattngttgancgcatgctgntgggaccttccaaggcagtctgccntttgcaacatgaagcaggaacagtggtgcccaggaggcatgggatgcgacaagatggatcattggaagacatggcctgggnctccatggctggtggactgcaggtcatggcccagaagttccccatgcctccgtgaatacaaatggaagtgatganaggcaactgggttggcatcgacctggatgggaatgaaaaagccacagggggaggcttgtgaaaagaaaacacatggncccccaccattgtttaccaaagaaaaggcacngggattaacttccaatcacattttgggcacttaccttnaagtaaccaaagcagnaatcacccacttcccttacctt

SEQ ID NO: 916 - DNA, 219 bp, homo sapiens
ctgaggtccaggctaaacaccaggaataaaaggtgaagaaaaagaagttcctggaaccactgcctgcaagctccaagctttctctgcagtcatgggacccgtgaagaacaactctgaacactgcgcagagttacagggctagaggcagagctttgaacaagccacatctcaaaactttggttttgtatgcccataaaattaagcagcagaaaaaaaaaa

SEQ ID NO: 917 - DNA, 147 bp, homo sapiens
  misc_feature (1)...(147): n = A,T,C or G
gagcatacttacggtcacctngaacctgacttcgtatctncangacctttacaataactnnntggctttatcacngcnattnatgatggntgncaaaagtctgnaanacactgaattccanaccttcatcattcttaaaaaaaaaaa

SEQ ID NO: 918 - DNA, 505 bp, homo sapiens
  misc_feature (1)...(505): n = A,T,C or G
gtctgggaattcagccaaaaattcctgaaggatgaattccttttcctcggtgaggttgacatttgagcacacatcgccctcttgtgtctacgacacatttggcaacgtagtttccagcacctgctaatgcacacagcaaattgaagccttgttaacatcccttaagcctgcagacctcggtacaaggcggagggagaacaaacgcaccaattttcccagaatagtcaagaacatccagaagaatccagaatttgtgaagatggtggaccttacctttcgaaaactgctatcaaggcctctgcangaggccctggctgtgataaatgtgcatctgtagaangnacaacctgaacattcttaccaagcaggcctgaccaatatntttctgnctaaaaaagggccatgctgaaagatgcctttnaaacccattttggccnttttnaaaaaaccgnacttgtgggataactggcccatncaaatcaataactggcttatctgatctggg

SEQ ID NO: 919 - DNA, 105 bp, homo sapiens
  misc_feature (1)...(105): n = A,T,C or G
ccctttttatcaccttccaaantccttantncaaaaataccctttaacctactcccaaanaacttaaatncacccncttgcctcctatnccatcatttcatacaa

SEQ ID NO: 920 - DNA, 182 bp, homo sapiens
  misc_feature (1)...(182): n = A,T,C or G
gaaaacttctttgcataaccatgaaaggactgctctctatgatccctcaccccattcacaggacaggnngcanctgcgangagcatactcacgccaccttgnaaccgatggncgnttntccagggtcttacanacnngcaacctggctcatcaccgggtattcaggatggcttgacaaaggt

SEQ ID NO: 921 - DNA, 118 bp, homo sapiens
  misc_feature (1)...(118): n = A,T,C or G
cagagctcacagcattcttgtcttccctncaaaaanctcttttctccaancctgtaaaatggccanattcaaangacntgataagttctccntncttcaaactcacaccaacctatct

SEQ ID NO: 922 - DNA, 826 bp, homo sapiens
  misc_feature (1)...(826): n = A,T,C or G
gcacgtcttgggggagctaccctggcattaaagtcaagnaacttggagttcttgggcttggaaacgttctnccattggacctcctgtcatcacattaacaagatttgcgcacacagangtactagcagctggtctagggaacntttagcgacgttactagctagagcaccttgggcacacgagaccctttccctattatacaatgcgaatggaaaatttgcaaagacactcgtgccatttttctactatctctatcaaccanggtatgcgtacttggacacactatcccacccgttccatccnantggggggggggggggaacaactaccaagcgaacacagctcgttgcaaagcaggaaaccaggggcctctttgnactcttgtggagacttgtggcacatcccnancttaccttntggganangatgccacaacnactttgttataaatattaagaaagttttgggtggggaccggnnngccnangtncccttgaagccaaaatttcttgnagcaaacttgggaanttncttgnggaaggaangngnnggnngnacncacgaattcttacttgggaccaggggataatatttgnttcggttttcccttaaaaggataaagccttgggtgggaaagaaagggcacccanatgggntacccatttttgttaccgtttctanggaaccattcaaaaaataaatgggatcccctgnntattttnggnaanggggaaacaagatttcattgggngaaacaaacttggatccaccattgggaactggcattcaactttggaataaggggggggccctttcatttaaggaa

SEQ ID NO: 923 - DNA, 190 bp, homo sapiens
  misc_feature (1)...(190): n = A,T,C or G
ccaacattcccctagaatacaagattttgaancagccntgcctgcaacannaangggngggaaatntatcttncntncnnntntttnggcnccagtgcttgncacataaagatgncccacaaaacttcaatgacagaagagggaaaggaaagaaagtctgacagatatctaactatatccaagaaagaca

SEQ ID NO: 924 - DNA, 423 bp, homo sapiens
cacaattaacagtgcatacctcctgggaacatgttaccaaaagttagaaggccaaattccctcagcctctatccagcatcacaaataacttcaatgagaaccataggaacatcgagtgtcctgtgaatctgagaactgcaatgggccctaggggctcttccatccaggcttatcatgattcaggagaagaaattgaggaccgaagacatcaaatataataagctaatggaggaactgaggctacttgcctggctccagtgctctttcctttgcctcaaaatctttacaggtcagccatctatcatgtgtagaataagcaaactgaattaacattggaaatattaaaaggaacagaggttgcgtggatattggttggaacagagaagaagttttcacaaggaattaaagtaacaccagctgctc

SEQ ID NO: 925 - DNA, 129 bp, homo sapiens
  misc_feature (1)...(129): n = A,T,C or G
gatcatgcttacataatgaaactccaataaatctctggacatggcancttgggtgagtttccttggctggtaatactctgtgtattgtcacacactgatgttctaaagagtcctgacttcacaggggag

SEQ ID NO: 926 - DNA, 334 bp, homo sapiens
  misc_feature (1)...(334): n = A,T,C or G
aaagctcctagccccgcaggggtgaaccggctgctgctcccgcgctgggagtgctgtccatccctcggtgctccagcagccgcccctgggaggacagccccgtttgaagcccacgtgcaggcgaaaccccttcagagctgggcatgggtttccagtcatcgccacatcactctctgtctgaacttgaacatacctcaagcttgctggttgttactgggtcgcagtaactagattttcttggggggttggtggtgggnggntggaaagatacatccagagaatgaaatgcaatgnngcctcttattcaccaagaaggttttcaagccagaaaaaa

SEQ ID NO: 927 - DNA, 352 bp, homo sapiens
  misc_feature (1)...(352): n = A,T,C or G
cctacatccatggatctgancaggaccatctntggacaagacagccagctggccaccagcacgcacggatatatttttctgccagtctggaggatgcagttgtctcctctgtgccagttatcatcttctgcattaatcactagagaagagctttggagactggattctcagatgttggtaccagaagatagctgtacggggtttcatccctcgacgtgctccaagcttggcttgccccaagggctcatcaaaaagcaggaagatcctggacttctatttttaagtgatagctgttatttaccccaagtctaataagtgtatatggaaacttctgcctcctcattgataaaaa

SEQ ID NO: 928 - DNA, 348 bp, homo sapiens
  misc_feature (1)...(348): n = A,T,C or G
aaagtagaatgtataaaggctgantgagggtnnctaagaggccacatttnnggtagcanctgngatttactgggaggagcactgganctggantnanaagatctggaccctantnttactagctcanngattntcaataatncccaanttaacttccctgaatntcagattcctcagctgaaaaacaggctcaagattgntttncatcctcttaccgcactcccagcccacagcttgctgtgaaagcttcatgagaacatgtgtgcggaagcacatgagcactgactgtgctagggcctnnnncggggcaaaagaggtagctttcctgacacttatgccagtttggtt

SEQ ID NO: 929 - DNA, 270 bp, homo sapiens
  misc_feature (1)...(270): n = A,T,C or G
ggacggccctggactatgcgcanggcagcaagtggganancctgcactgtccaacaggttcacatgcgaggatacaggatatacgcgggtattgtacacaatntgatggacacatagagcattacctgcactggctactagggaagactctccctcggganttgtactcgcgaaaaagatgnancatancgacccatcctttgtgtctcttgcgcactngtagctngatngaacacgngaatcttgcggtaaccaagggcgtttggaagg

SEQ ID NO: 930 - DNA, 295 bp, homo sapiens
  misc_feature (1)...(295): n = A,T,C or G
ctggggtgaaaggcttaagtcatactgaaggcgctgtggtcccaggaaaaaaccngcattttctnncntacanagctantactggatncntggngagnaaaaggtgantgcttanggagggcctggcttcacttnctcctttngnngggggaangaaaaccattcctacttccagaggttcgngatggagttnaatgaggataanggggtgccccngattgaccacantattatttcaaaactggnnaacttcccttcttaccacttngccaataaacttcaaatgctgaagggc

SEQ ID NO: 931 - DNA, 458 bp, homo sapiens
  misc_feature (1)...(458): n = A,T,C or G
ggcatggagccaccccatggactncncttggggggtgggagagcctacncaggggggaggaaaggccngcttccncaatcatanncaantggcagaaaaaaaanggggnggcnttgggaaataaggcttgctnttgcttgaaaggggaaatggaattcattttggaaggggggaagaaaaccaangntgccagactggaaaagaacaagcnaaattgcntggaaagccaaattataccaccaaggttaaagcttgggnaaaggggaatgccaaatcnttaaacgccaagtggggaaagaaaaaggggttggggcnttccgctttggaaaagaaagtttccattccttgtggattaaaggaaaggggaagaaggaagaaaccgaaaagccattgttgctttaagccaaattaaaaagggtttaccattattatttttggggggaattttggtaaaaaaa

SEQ ID NO: 932 - DNA, 138 bp, homo sapiens
  misc_feature (1)...(138): n = A,T,C or G
gacacttacgccctctcacagangaaggtaagggttcanncancagcacatagaggattatcctnattgacccaggactgacantgtnagtgaattctaannctncgctatgtggtgaatntacttgataaaattgaa

SEQ ID NO: 933 - DNA, 129 bp, homo sapiens
  misc_feature (1)...(129): n = A,T,C or G
ttgacctgatgaatcacatgaaggatgatgcccnnatgcttcaanagctcccggatntaagtcaccaccttaactgcctattnancaggcactcgaatganctcncaangccatttgttgactgggatg

SEQ ID NO: 934 - DNA, 235 bp, homo sapiens
  misc_feature (1)...(235): n = A,T,C or G
aggcctctgaagaggcccacatggtgaggaactaaagcctactagcaacccacatgtgtgagcttcgtaagcaagatcttgaaggcctgcccaaaagccacattgaataaaaccgtgggaagcaaaattnccttttaccccaccccaaccccncattgaaaanccttcaggangggattcccacangcttcctttnaaaatanctttaaanccccagttcttcaaaaaaagaaaa

SEQ ID NO: 935 - DNA, 252 bp, homo sapiens
  misc_feature (1)...(252): n = A,T,C or G
cgggagcaaatttcctttttttaaggttcctcnncaaatgaangtggaaanngaaaaccttttgcctttnatttttggattangcantaagcaaccccntgaaaccngaaggtggtaagaacttcnggcgttggaattaanggcggttgnctgaatggnccagtgcggggggnngnangncttctttgggccnacccccnaaaaaangttggttattatttnataaacttttggggaaccaaaaaaggaaaa

SEQ ID NO: 936 - DNA, 280 bp, homo sapiens
atgggctctcattgtgtaatccaggttgacctggactttacgtcaatcttcctgcctcagcctccccagtgcagactacaggaaagatccacccaccatgtccggctcatgcgaagggataattaccacctaacatgtgaaatgtcttcttctcccagtctatactgttaaaatcttgcccgtcctgttgaaattcaaatatatgatgcgcatgtatgaaaagatcatgatgagacccagtattatgtataattaattcatggcaataaaacgttgtttt

SEQ ID NO: 937 - DNA, 106 bp, homo sapiens
  misc_feature (1)...(106): n = A,T,C or G
ccttgacagcaggaaaaagagcgggctgcnacancagaactggaatggttntttcatgcacttttcagtgngagacacagtcattggngctctgtattgcatgctg

SEQ ID NO: 938 - DNA, 281 bp, homo sapiens
  misc_feature (1)...(281): n = A,T,C or G
tcccacctactgtggccntgtctgtgtngnagaactccntacacccaggntttgngtgatccanccgaaaagtgggccatgcatggtacnctggantgttnctgaactanccacaaagaatgnaactcttgccaacaacaaaanttgnncttgnaaaannantatcnccnaaaggatacaaaatgactttgcccccngngcatgcnaagccatgcatgctggggccgaacttcnngatactgnagaagtcctgcctaactaaatgagtgctgttttattag

SEQ ID NO: 939 - DNA, 326 bp, homo sapiens
  misc_feature (1)...(326): n = A,T,C or G
tggggctgggggagctaccttgcatttnatggcaaaacntccagggttcccttgatgggngccctngggttgaacattattcttcaacaaacaaacttggttgggaaaaaagcnggggttcttncccaaggaaacnaccaaagaagagggcccgggacttttggaancnntggggagggnccttgggggnctggnaggacttttgttgggggcccttgggggggtaaagganggcttgggttaccaaaangggtttttggggattcgggggttcatttccctttggccacccacccaaaaaaagtggggattgccaccttggaaaa

SEQ ID NO: 940 - DNA, 101 bp, homo sapiens
  misc_feature (1)...(101): n = A,T,C or G
ggaaccaattggattaaaaggaaaancnaaatnttggaaaatcccccccaatacngatttttgaatgccaaccccntncgccttggccttttggaaaaaat

SEQ ID NO: 941 - DNA, 154 bp, homo sapiens
  misc_feature (1)...(154): n = A,T,C or G
ttgtattattaggaggagacnatgcccaccatgttaggcatngatggtcccaatntcttgacctcttnatgcacccgccttggcttaccaaanggctggaattacaggnttagatatcactgaacccatnctatantgctaataaactaagact

SEQ ID NO: 942 - DNA, 400 bp, homo sapiens
gctctccctggcccagctcaacaggaagtcagaagacgtggaagcccattgatgcaacccatatacataagccttcaaaaggaactgaagagaaattttagtcaagaaaagctacagaattcaaatgagctgaagatccctgatgactttcctgttcataatcagatcgtagctaatttagatgttgacttactggtaacttcatgtatgatcaaaccaaattgaagatctccatgaagtagcactttgtgggaaaaaagttttactgatattggcagtaaggttcagatccacccatctaaacctctacctaagtttacaaaatacctctaaaaccagatgctaaagaagaactaaagccaatagtccaaaggcctaatagagaaaagatgagattttt

SEQ ID NO: 943 - DNA, 193 bp, homo sapiens
gtggattggctccaggatggaccaccatggataacaaaatctggagatgctcaagtctcttacagccagccctctgggtccacagatacaaccaaccacccatcagctgatgaggaacccatagatttaattacatacagataattattaaagagattatctgcagaataaattattaacatacaaaaaaaaa

SEQ ID NO: 944 - DNA, 130 bp, homo sapiens
  misc_feature (1)...(130): n = A,T,C or G
catattcacccacatgaatctatgaagttgagaanggttccacgagagtcatgatatcctgcctaagatcttttcacttctttttaccacgtatcatataanagacgacatttttgaggcgacataaaaa

SEQ ID NO: 945 - DNA, 194 bp, homo sapiens
  misc_feature (1)...(194): n = A,T,C or G
accatatatcctgccccccgntgcagggctacatggntgatgnttaaaagaacnagtttgcnatanaaattnaaacnggcgcgccctcnaggaattntgatccnnacgccntttaaatgggcgntanggccgantctttngcgtttttaccctggaagaaaatactaatangccacctttgttttttaccccca

SEQ ID NO: 946 - DNA, 267 bp, homo sapiens
  misc_feature (1)...(267): n = A,T,C or G
gaaaagccttcaaataagaagattgagangagttgggatggntgctcanggctgcngctgggtaaagctgtctctcactcccntttgagnganaccaggctggagtanncacaagctnctgcgnccaattcttttgtgntataccctgnnngaataactgataaaccacctctttnttnnncccangncttacnaagaaaggtgtgncttctctcatcagtcctattcagcatgtactaaaagtcctactttgtgcaaaaaaaaaaa

SEQ ID NO: 947 - DNA, 118 bp, homo sapiens
  misc_feature (1)...(118): n = A,T,C or G
gtgctactgcttaaacgtatactnntttaacattgtccggcccttncgtataccagnactgccnanttncaaccatangaataganntctgccaacaacaacaatgagcttgcaacat

SEQ ID NO: 948 - DNA, 134 bp, homo sapiens
  misc_feature (1)...(134): n = A,T,C or G
gagctcctgtgttggaaaacacatnttgactntgtctancggaccanactgngnnnncaananctannacataaagtgctcacgaggccctccagaagcctcgcagactgcggcagaaccaccctgcgcaaaag

SEQ ID NO: 949 - DNA, 213 bp, homo sapiens
  misc_feature (1)...(213): n = A,T,C or G
tttggggggggggggggnaaagggcccctttaaaccccccctttgggncccaattttttttaaaaaaagggtttncccaaagggnaaaaaancctttggggaaagggggggaaacccttttttttttgggcccccctttncccccccgggggggggcccccccaaaaaaaaacctttggggggcccaaagggtttttttcccaaaaaaaaaaa

SEQ ID NO: 950 - DNA, 440 bp, homo sapiens
  misc_feature (1)...(440): n = A,T,C or G
gtccatggggtgagatcgctgactgactgaantgaaactgtnctctggggtgtgcagtgacccaaagaccaatggagggaggaagaatagatgctccaaatggccactgcacttctccantgtctgaagccacctgcaaatgattgntagtcactgcctgcactgagacaggattctnaggccaagtcanggcttagcaggaaagaatactgtgacctacacgccttctcanccaaacgcacangnacaggaatggccacatatngtgcntcgggtcanccaacgtttctngggggcttntccacgggcaagactcctttcataatccctttggngatgccttgcaaataattcncattctnccnaagcccttcaccctcaccctatgaaaggggttacctgaaatntaaaattctttgggcngtgggacccttggaaat

SEQ ID NO: 951 - DNA, 252 bp, homo sapiens
  misc_feature (1)...(252): n = A,T,C or G
tcttcttatgaatccacttcaccccatccacaaggncagaaancagcgngnagggagcatacttcaaggtcaccttggaacccgatggtgtatctccanggtcttacaacaagcaactgggcttcatcacgggtattcaggatggcttgacaaagtctggaagacacttgaattccagcctcaggaagtatttttcatctgtatgctcccttgttgtggctaataaaaaaacgtgtgttttcatggaacatc

SEQ ID NO: 952 - DNA, 285 bp, homo sapiens
  misc_feature (1)...(285): n = A,T,C or G
ctactgggaggaggtntcccttattctgaggaggattactcccngaggatggctcagttgccccnttnacttgtngagcctantcnncctacagaatgggnnggccacccaactanggccttaatnggntgagnnccatngnacttggcctaacaccctctaacacttttgcagagtaaatcaaacatccagtgaatttatacatttattgatcaantggnccagaacccaccnccancctttngganggccaacattaaaacggggnngcttatggcctggggg

SEQ ID NO: 953 - DNA, 283 bp, homo sapiens
gtcttggaacagatttggacctctcaggaagacccccggtcatccaagctaaaatgcgaaccatctccccaactgctttttatcacagtaccctgttttgtacacttcaccacttcactacttgtaattatctttttttaattgcttactttctcaaatgtaagtttcacaggtgcaaggattctgtttgtcttgctttgttaccactgaattcccaatgcaaagaaaagggcttggcaggcagcatacaataaatattgattgaataactgaaaaaaaaaaa

SEQ ID NO: 954 - DNA, 145 bp, homo sapiens
  misc_feature (1)...(145): n = A,T,C or G
aaccacaaatgctggttgananacgangcttcatcatgttgccaggctcatntacatctcctgagctcaanagatccactcaccgtgncctcccaaantgctganattncaggcntgagccaccgtanctggcctgaactgtact

SEQ ID NO: 955 - DNA, 105 bp, homo sapiens
  misc_feature (1)...(105): n = A,T,C or G
tatgcaacttccttgggtgaaatgtcacancaatatggaagatgcttcactgaagttattcncacttcttaatgattaaacttttaaggaactgaaaaaaaaaaa

SEQ ID NO: 956 - DNA, 224 bp, homo sapiens
  misc_feature (1)...(224): n = A,T,C or G
ttccaagaaaaaaccttggaagnnaatgggccaaaacctttttccctttttggggggtgggaaaaaaatnggttccaaccaaggccaaaaattaaattggggggaaaaaggnaaatnggccttttccaaccttgggaagggggtgttaatttttccaaccaaaccttttccttttaaaaattgggaatnttaaaaaaaccttttttttaaaagggggaaaacct

SEQ ID NO: 957 - DNA, 133 bp, homo sapiens
aaagtttatctaagaatggatctggaaagtgattcagagagaaagtctcgtctcttccttaaaactcatcagtacaggccaggcacagtgactcatcaagtctgtaatctcagcactttcggaggccgaagca

SEQ ID NO: 958 - DNA, 327 bp, homo sapiens
  misc_feature (1)...(327): n = A,T,C or G
acatgctgactgcaacnaacctattatggtacnggtnatcctgtnccaagcaacntgaantgggtccttanaanacactgantgtgccnttccttgaccttggactncnntctccataactgagagccacaaatgctgngtgtganacnangcttcattatgttncacnggctgatctccatcgttctgtgctcacgagatccactcaccnaggcctnccnaagtgctnntattactggnatganccaccgnnnntgccctganctgtactcttgaaaatgggtacagataataccatttaatgttttgngtttgcactacaatata

SEQ ID NO: 959 - DNA, 228 bp, homo sapiens
  misc_feature (1)...(228): n = A,T,C or G
ctttggccatttttanaaggttccangaaaaaccctgggcagnnaatgggccaaacccttttccctttttggggggttggaaaaaaattggttccaaccaaggccaaaattaattgggggaaaagggaaattggccttttccaccttggganaagggtnttaattttccaaccaaccttttccttttaaaattgggaatnttaaaaaaccttttttttaaaaggggga

SEQ ID NO: 960 - DNA, 452 bp, homo sapiens
agaggccaatgagacttgaaccctgagcctaagttgtcaccagcaggactgatgtgcacacagaaggaatgaagtatggatgtgaaagaacgcaggccttactgctcccttgaccaagagcagacgagagaaggaacggcgctacacaaattcctccgcagacaatgaggagtgccgggtacccacacagaagtcctacagttccagcgagacattgaaagcttttgatcatgattcctcgcggctgctttacggcaacagagtgaaggatttggttcacagagaagcagacgagttcactagacaaggacagaattttaccctaaggcagttaggagtttgtgaaccagcaactcgaagaggactggcattttgtgcggaaatggggctccctcacagaggttactctatcagtgcagggtcagatgctgatctgaaaatgaacagtgatg

SEQ ID NO: 961 - DNA, 133 bp, homo sapiens
  misc_feature (1)...(133): n = A,T,C or G
ggatgaattcaagctaaaagaaaagcacactgatgattctcctctcaacccatccggcaactgggggaagcagctttgnactacacaagaacagggaaataaatattntttaatttaaggtcaaaaaaaaaaa

SEQ ID NO: 962 - DNA, 137 bp, homo sapiens
  misc_feature (1)...(137): n = A,T,C or G
ccctttaaaccccccttggggcccaatttttttaaaaaggggntttncccaagganaaaaancctttggggnaagggnnaaattggggccccaaaaanccctttttttccccccttttttggggggggggtttgggg

SEQ ID NO: 963 - DNA, 400 bp, homo sapiens
  misc_feature (1)...(400): n = A,T,C or G
agccctttgggagctcctgnattaantcactaactgancttganaattatatccaggacaacatgaagaaagaaatgnttnagatacagcagaatgcagtacagaaccagacggctgtgatgatagaaatagggacaaacctgttgaaccaaacagctgagcaaacgcggaagttaactgatgtggaagcccaagtaagtaatgccacataaagcacacggtgtccctgcagctagagactagcactcagtcgcgtcaggagcttcctcaatgaaggcatgagaaactaaagaaagcaccaccacaggagaaaaggaatgaattgataagaaattaaaggatgtatggctgcttatgaattaaaaatcagtaaatctgtttttgtttttaaaaaaaaaaa

SEQ ID NO: 964 - DNA, 427 bp, homo sapiens
  misc_feature (1)...(427): n = A,T,C or G
tttcactcccgtcttttctnctgcattanctcaaaactgangagttgaggcagtgcataacgcanattctaaatggaattcttggatggaanaanacagtcactaattcctggttccanaatgtncacaaaattaactagattacataaatatctacatgcacattgtttattgtacatgttngataatnatgcattntccatgtaacgtgntattacctnacnttttcaananctttcanccnccnccangccncntntaaaacttttaccactcctttccctcatntaccncatcnactccaaccactacgaatagacnccccctaatctnccntnncaatttncncactncctnatttacactacctctccccttctcnctccctccactntntttntcnctattgtataccctctcccctcaa

SEQ ID NO: 965 - DNA, 327 bp, homo sapiens
  misc_feature (1)...(327): n = A,T,C or G
tatctgtcatgagacatctaaaaaactgttctganctttgacattctgccatttggagantgctatatgactgctgantgncanatcaggctacntgctgnngntacgtgnctgnnccaccacgantggccggccatagcctnttaaatgctggncattnttcaaggcccccttcaggaaaattngggaggacctctctgaatctgaagacactgcattgtaaactccctgaggacaagagatcatcccagtctttcttgcaaagnggatggagtcaaggaatttgaatggaggaaatggtgaaataaaatacaatctcttacctgg

SEQ ID NO: 966 - DNA, 223 bp, homo sapiens
gttttaaggccgctctgttgggaccatggtgttaccttcgcgattacactggatcagaaacaggccatggagggacaggatccggaggcgccagctcaaccaatttcttcaggttgaattacctagaagtttgtcactgacttgtgttcctgaactatgacacatgaatatgtgggctaagaaatagttcctcttgataaataaacaattaacaaataaaaaa

SEQ ID NO: 967 - DNA, 299 bp, homo sapiens
  misc_feature (1)...(299): n = A,T,C or G
tggaagagcctattcatcttccaaggctgttngctttgcacacatcctgaaaagatagtctacgataaagttgttatgaagatgtatagaaactctggagaattgctcctcaatcatcatccctaaacaaaatgctgagaaagaaaatggcaagctgctgtggaaatacataagaaggaaacaaaccatctgagcatccttggaggcttcctcaggaagatactttttaaactgggacctcagaaaaagatgatngaattaagaagtaaaaacacaagagaaaaagattaaaaaaaaaa

SEQ ID NO: 968 - DNA, 385 bp, homo sapiens
  misc_feature (1)...(385): n = A,T,C or G
gcatcatctctagaatgaaagaaaggaagaaactgctgtggtcagctatgatcagacagactactggattttgtgtaccacattttacaagggctagacggagtcagaaagaaccactgggagcaccagcagatcctgcccacctgtgagatgggcagaaccctggccgtcctgcctgcggagacagctttaggatgatgctggaagctactgcttcacccactgctgtccaagaagccttacccacatgatctcaaccttcaaacagccctgtcatcttcagcagcacagcctccatctttggacccaagcttggaaagcatagctccctctttttanagntgtccatttcaaagcatctccagtctggatcaacagaagggga

SEQ ID NO: 969 - DNA, 103 bp, homo sapiens
  misc_feature (1)...(103): n = A,T,C or G
tctataatgaaagaaaggtaagaaactgntgnaggtcaggcttatacatcagcacatgactactgggnttttgtgtaccacattttacaaggggctagacgga

SEQ ID NO: 970 - DNA, 176 bp, homo sapiens
  misc_feature (1)...(176): n = A,T,C or G
gttacaagtggggcaccatatnagctcgctnggcaacctccgcctcgcaggtncaanaagattctncttgcctnaancctcccaagttagcatgcaattacagccatctttccaggtttgagaccctctnctancancatgaagnaganatnatgaagggaagcaaaacctacagg

SEQ ID NO: 971 - DNA, 274 bp, homo sapiens
  misc_feature (1)...(274): n = A,T,C or G
ggcctaaccccttggccattttaaaaggttccaagnaaaacttggaagaggttccccccttggccttggaatttccttccccaaaaattaattggttggttccttaaaattccttggttttttancttggaaggttttccccattaangccaacttttgggganggccccattccccattggccaaaaaaaaattccttgggtanggaaaangaagccattttcncnangggaaanggaaagggggaaanggaaanccaaaaatgggcccaaaa

SEQ ID NO: 972 - DNA, 390 bp, homo sapiens
  misc_feature (1)...(390): n = A,T,C or G
ttaagtcagactgagattcacagagcaaccaaataaagatgattgagtgaatggctaaagaaataaatatgttcgaatctgtacccatctcatgtctttcctgataactaagagtatttttaatacagtgctgaagagccagctgaactggctttgtagatcatcctcaggaaactgacggtcaggcctcctgtatgacaccagggggctgaggctttatggattggatcactgcacccaatgagacacacctgctgcctgtcgaaccaaccctcttcctagctgctccataantnctttttttcctgnncnggacccggtctaccaattatagatcaaattcagctacctgctgctgnngaccanctgctctttctctccctggggtcc

SEQ ID NO: 973 - DNA, 346 bp, homo sapiens
aggtgacccagtgacagtggccaacgtgggggctgctgcagacaatgtcttcaccacgtctgtggcgaacgcggcatccatctcaggacatgttctgtctggtaggacggcccttcagatcggggacagcctgaacaccgaaaaagcgacactgattgtcgtccacacagatgggagcatcgtggagaccaccgggctgaaaggcccggcagctcccctcaccccaggtcctcagtctcctccaacccctctggctcccggccaagaaaaaggtggaactaaatacaactgggacccttctgtgtacgacagtgagctgccgtacggtgccggaacatcagcggca

SEQ ID NO: 974 - DNA, 367 bp, homo sapiens
  misc_feature (1)...(367): n = A,T,C or G
gagagtctcctctgacatccaggctgnantactggncgcgatcttggctcactgcnanctccgnctncanngttnaancgannctcctgcttcacnctcctgagtagctgagantgcaggctcagccaacagagaaagaagaggagaagcagctggatgttgtagaccacggttggacatcggagagaagcggcttgacttcagagggacagcttgatggcatagctttggagaggagtctggctggggatgaccggactccaggggattatcttcctgcttcatccccctttcagctccccttcctgttgagagccactttcatcggcaataaaatcccctgcatttaccatctcaaaaaaaaaaa

SEQ ID NO: 975 - DNA, 362 bp, homo sapiens
  misc_feature (1)...(362): n = A,T,C or G
ggcagctttggaagaagtagaaggtgatgtggcagaattggaactaaaacttgataagcttgtgaaactttgtattgcaatgattgatactggaaaagccttttgtgttgcaaataaacagttcatgaatgggattcgagacctggctcagtattctagtaatgatgctgtcgttgagacaagtttgaccaagttttctgacagtcttcaagaaatgataaattttcacacaatcctgtttgaccaaactcanagatcanttnnggcacagcttcagaactttgttaaagcaagatcttagaaantncanagatgcccagaagccattcgaaaaagnccgtgaaaaaaagcactttgggagg

SEQ ID NO: 976 - DNA, 119 bp, homo sapiens
  misc_feature (1)...(119): n = A,T,C or G
taaatggaatcatcacgccatttaaatggcngtttttggtgcaataanttttggttttttacccngccagngaaanaacactttaaangnncccttttatattatacccccccatcttt

SEQ ID NO: 977 - DNA, 358 bp, homo sapiens
atgtacagatacacgcagagcgattcatcaactataaccagacagtttctcgaatgcgaggtatctacacagctccctcgggtctggagtccacttgtttggttgtggcctatggtttggacatttaccaaactcgagcctacccatccaagcagtttgacgttctgaaggatgactatgactacgtgttaatcagcagcgtcctctttggcctggtttttgccaccatgatcactaagagactggcacaggtgaagctcctgaatcgggcctggcgataaagaacaaagactgtgcctaaaagtggagagccaggggagtgtgggtcaagataagcagctacagctgcagtttggtg

SEQ ID NO: 978 - DNA, 269 bp, homo sapiens
  misc_feature (1)...(269): n = A,T,C or G
atattcgagctacaattaatatgctcntntgtcacanacctacncnaccttanatatacaatngacctattgatggaaatctcttntttnacacagtaaactacacnacaccacantgnagacatattntctnggncatcattctattccttnccattcttccccatttanttgcaacatcnattgggacnttacgatttncntngcgagngggattggnggggccccctaagctctcactctttctattatctacatcataatagacc

SEQ ID NO: 979 - DNA, 461 bp, homo sapiens
  misc_feature (1)...(461): n = A,T,C or G
ttattttttcccgcggcncaccntttgtaggaaaaaaagaanggngggtnggataanncccgcaaanaggncgcntnccacaaaaaccccacccgcggggggtgggaggntttataanaaaaatggggggnncaaaccccttntttgaanccaaaacgngtttggggccaaaancgcggggaaggtttaancctggtgtggngggaaacccccaagttangggtatttggccccccnttaaaaggcnnccccnggggggtccccttggcgngcttaanaaaaatttanccnctttcaattccncggttcnagggangncnttccttcaattggaaaangggcctttggaggaaaaanctttaaaaagaaaaagggcccccccccccccgggggnggnaaaaaaanggggaattggaantttggttttaaagaaaaaatttaaaagggattggttttggggc

SEQ ID NO: 980 - DNA, 228 bp, homo sapiens
  misc_feature (1)...(228): n = A,T,C or G
aactgaggataaggcatcaggaaaggctggggatacactgatgagcaggacacatgagatcagaaaggatccttcaactttctgaagtttacaccctacataaaaaacttcattgttcttcatattgcagatgtgggcaccctactattttgttgggttctntgaactntaaagttgtntattaatngggcattttatatataaaagaatacgttccaaaaaaaaaaa

SEQ ID NO: 981 - DNA, 113 bp, homo sapiens
  misc_feature (1)...(113): n = A,T,C or G
gaattggccaattcttgttgcntttttacccctgggangnaaaatacttcataancccacctctntntatttntacccccaatcttcacaagtaaaaactgttaatatcgagg

SEQ ID NO: 982 - DNA, 209 bp, homo sapiens
  misc_feature (1)...(209): n = A,T,C or G
aaatcacattcccacatatacttggatctgtttctgggcnctctattctattgattcctttgtctancccgcaccgataccncattgttttaattactatcgctttcaaaaaantcttnntatttgttannggccaagccnctttccttattctttttcanaactggtctacttttttctttgnnnnctttgcccttctctatgaattt

SEQ ID NO: 983 - DNA, 301 bp, homo sapiens
  misc_feature (1)...(301): n = A,T,C or G
cttgagcaattatatccaggacaacatgcaaggaagaaatggtnngatatacagcagaatgcatntacagaaccanacnnctgtnntgatagaaatagggacaaacctgnttgnaccaancagctgaccaaaacgcgntagttaacctgatntgnaagcncaaagtangtnatggccaccatactagctacacgggtgctctctcttgtcagctcagaagaacctaangcacctccagntctncagctcaaacgagctttcccttcaaattgaananggcatgcaatgaaaaccttaatag

SEQ ID NO: 984 - DNA, 397 bp, homo sapiens
  misc_feature (1)...(397): n = A,T,C or G
ctctgtgtacagacttcaaccggaaagaatctaatacctacttgtggaaggtgctgcttgggcaagnggacacaccgttcaaggggangacaccaagcttggaaagtacaatggggccattggatctttgggctcacttgtgaacctcttgcctcctccttgggggttcaaaagccanatnttctccttgcctcaanaccttcttcaaaaatnaagcttggggggaattaacaanngggnggntggccaccaacccaccaccttncaaggnttaaattttttttgggaattttttttaaggganncaannatggggatttttttccacccaatnggaattgcccccaagggcctggggnccttggggnaaaattccttggacccttccaaatttggc

SEQ ID NO: 985 - DNA, 157 bp, homo sapiens
  misc_feature (1)...(157): n = A,T,C or G
aaaattaactagattacataaatatctacatgccattgtcaggccatntccaaacttncagagcatgactnntnccantncggattanncccgatntncanacgcangagcattccgccagatgggcttctaaaactttaccactgtgtcctcaatg

SEQ ID NO: 986 - DNA, 539 bp, homo sapiens
  misc_feature (1)...(539): n = A,T,C or G
agaatatcttaacatgggcacattantttgnaaatgggncttnaaatggacganatgcccntcaatctanngagggttgganaccaagattctnaagaatctncacngnctttcnattggcctctntggacctaattcctctnacccacccttgtgaagggnaagtaagaccaggccaccaaggnangggattggaaggaaaaanattttgganaagccttcccanaaaatttaagttttttggttggccaaagnaatcaccaaaaacctttattttaaaaggaaggggccaagnaaaccccccattttttgccaaggaacttggccggttccttttggaangaatcccccaaccgcccanggaaaacccttccgncnaagccttggaaagtngntccccaccnttgggtngggggaattnaaaggnaatccnacccctttaaagaaaaagnccaaaaaacttaagcccaacnttcaaagcctttggnangccccccatttcccanngggggccccacccctttaccttgggaaccccc

SEQ ID NO: 987 - DNA, 538 bp, homo sapiens
  misc_feature (1)...(538): n = A,T,C or G
gtcaaagatggcatagatctggtgtccaggagacactcggtgcatggtagctgttgtcatcatancccatggaggntttgggtgacctccaaagggcagggcttcgggaacatcactgncttctgctccacggaagttgtctctaactcctgacatgctggaatagccctcaagtgatcagaanaaatgctaaatgntaacttttctgnacatatttttaaaatctgactttcataatagtctccactgttgnagagttagagaaaaatgaaagtctatctatagtaaaactttgngattaaatattatggtgcaatgccccaaaaatgaaatgttctgaatcttgaccgcggatctccatgtatattttaaaacttccatcnacccctttttctacattttcctcttcattttggtgacctttgcagaaactgagctctgggtcacctctgatcagctgggcaatacccttgacattggntacatatgctggccttctggcttcaaaattatngctttggtttccccaataaaagca

SEQ ID NO: 988 - DNA, 288 bp, homo sapiens
  misc_feature (1)...(288): n = A,T,C or G
ctgggagctcctgcttagtnagaactggagccctgtaccatgaaagatttctggccaccctgctgaagaggccacatggtgaggccacatggagaggaggagaggtccactgatccagcattttagttgagcttccagctgactccagcctcaagctttatctgaatgcacctgcatgagagacttctaagcaagaccagcagaagatccacccgctgatcccagacaacccatggaaccatgagagagccaataaaattgtggtggttttaaagccaaaaaaaaaaa

SEQ ID NO: 989 - DNA, 228 bp, homo sapiens
  misc_feature (1)...(228): n = A,T,C or G
ctataacaacgaaaaacatcgcttnaaangnancnntttctcaatcatnacccacaggatgttnncctatnataaaagcctgcattctnacttaataatacgtttagaacatggccnacaactctnaccagggagaccanantttcatttctttttgaagcaactntggtctccccaaattacnnccttttgcacatnattnatttgaatgcatctcctataaaacca

SEQ ID NO: 990 - DNA, 104 bp, homo sapiens
atgcaacttccttgggtgaaatgtcacagcaatatggaagatgcttcactggagttattcacacttcttaatgattaaacttttaaggaactgaaaaaaaaaaa

SEQ ID NO: 991 - DNA, 388 bp, homo sapiens
ttatttccttaaggacaacaggatgtaaaacacaaaagacaaatgataaaattggaaaaatatttgcaatgtaccgagtctaaaaccaatcagaaaagggcaaagtgcatgaaaaagctcctgaaggagattctcaagaggacagctagacgggggaggattgcagaaagcttgacatctacagaatgctggagaaatgtgaggttgcttaccctgaagaaatacgggatgacccagaagctcggcctcctgggaaggcagcctgttccctgccatgtgaagtgcgctggcagagatcagaacggcatcctcgaaagcaacccacgattctgcttaactcttggttaatattgaagaggaacttgagatccacagagggaaagtggct

SEQ ID NO: 992 - DNA, 105 bp, homo sapiens
atgcaacttccttgggtgaaacgtcacaagcaatatggaagatgcttcactgaagttattcacacttcttaatgattaaacttttaaggaactgaaaaaaaaaaa

SEQ ID NO: 993 - DNA, 101 bp, homo sapiens
  misc_feature (1)...(101): n = A,T,C or G
catacaccatgacaatctcatcaagncaatcctcaatacncccagcatatgcgctttcttaaancaacntcttctctcacataanctacacttcccatgct

SEQ ID NO: 994 - DNA, 661 bp, homo sapiens
  misc_feature (1)...(661): n = A,T,C or G
agcctacctaggcatntatagntgcaggaactagnagnaataacctnnnaacnggantgtgatgtcctgaannngcactacacaataatataggcacaaaaanncctcatanttgnatccaatgcctacatgantntagaagtgcactggatcctccatcatggactanatcatagtacgacggcagactgcaacgaggggaagacanctcttgcccttgaaaccanggactnaaagaccccnagnggnctagtcccacacattggctcgtcgtagaanaggncacnncnggnattngccattccctngcctcctnanccgttgtagacccgccaatggtcgcacntactctatttccttgggcgcctaggcacatggaaaacggacaaagatagcaattcgccattgcataggagggcgacttcgtcctagaaacgaaagaacaagtacaaacgccccacgatgtagttgttcgtcgcttacctcatgcatacaagacttgggtggtatccatcaacattaatcaaaagacggctaccaacaacgactaggctccaacaaacntacataaaaaagagataggaacnggtcactctgcnaatntgtgtctcttttgtaagcccaagtntggtgnntaccttttcaaaactcaaaattggcc

SEQ ID NO: 995 - DNA, 442 bp, homo sapiens
  misc_feature (1)...(442): n = A,T,C or G
tgaacagtaaggagttccttgcaaaagaagaaagccaaataccagtggatgaagtgtttttccacaggtattataaaaaagttgctgttaaagagaaacaaaaacgggatgcagatgaagaaagtatagaagacgtggatgatgaagaatttgaagagctgattgacacatttgaagatgataactgtttcagctctggaaaggatgatatggattttgctggaaacgtgaaaaagagaacaaaaggagctaaggataacacattagatgaagattcagaaggtagtgatgatgaacttggtaacctggatgacgatgaagtttctttaggaagtatggatgatgaagaatttgctgaagttgatgaanatggaggaacattcatggatgtgttagatgatgaaagtgagaaccgttccanaacttgaagtccactccaaag

SEQ ID NO: 996 - DNA, 203 bp, homo sapiens
  misc_feature (1)...(203): n = A,T,C or G
gacctacatcatgatncgntcttacaatcatctngacctagatatncttcanctatgctggacattcctcttccaaggaaatcacnacacacnagcacccatatattctcgtntcatcttggctnacattgtgcctnnntattccacngccatcgagcgntnccacntcatncngttccattaccanactccctagcctaatt

SEQ ID NO: 997 - DNA, 105 bp, homo sapiens
  misc_feature (1)...(105): n = A,T,C or G
ctattattcttaatttcnnttctttttcttaatnttttcggncctcncctttttattnccttctgaggnccccccctttnaaanccctttgggggtgccccaaaa

SEQ ID NO: 998 - DNA, 175 bp, homo sapiens
  misc_feature (1)...(175): n = A,T,C or G
cagtcttaacacaatcattttaacctgtccttcncananncgtgtangannctncaanccnaacattcctcaacnntactactacaggaacataatacctgctgaaggggctgctgacaaacatcacccacagatgtgcctctagaaagctgtttctactataagcgtcagaaca

SEQ ID NO: 999 - DNA, 208 bp, homo sapiens
  misc_feature (1)...(208): n = A,T,C or G
tcggacgagcatgttcatcaaatgtgctganaaccctctgcacctctccacgttgcccatgcccatttnctggcatgaagaaggaaaatcatgctgaagngggcttgcacgacaatacatcaccccacagtatggngcctctagaaagctgtttctactattangacggtccatgacatgccancactncttacgagcgcggacaata

SEQ ID NO: 1000 - DNA, 120 bp, homo sapiens
  misc_feature (1)...(120): n = A,T,C or G
gcccaactcatctgctgatgcctcngatnaatcactgctcactgggcaatggtnaactgngccccactgcctggacgagcatcntcnttgaaggagatagnaaccctctgacacctgtcc

SEQ ID NO: 1001 - DNA, 153 bp, homo sapiens
gtatcacaagatgtcgtaagaatctgaatcctccaaaagacagatgatgcggaggttcctgggggaatcaaagagaaatgtgcctcatttgccatttgagaaaatgcagtctggtgtattcagtaatatatagtaaagtaataatgataaaat

SEQ ID NO: 1002 - DNA, 548 bp, homo sapiens
  misc_feature (1)...(548): n = A,T,C or G
ttaagtccagaaactngagccaacttcttgaagctggnctttgggaatcctaaattctttcccnaatttcattggcccacaaaggccccaaacttcaatcnagcttggaataacccttggaggggaatggaatcccaacttggcttcaacttggaagccggtggggtccaagggggaaggccggcccggcttggtccggggaacggaaggccaattcttttcaatcaaaaaatggtggcttggaggaaaccccttcttggcaacccttcttcccaacggtttggcccccaatggcccccaattttcccttgggccaggaaaagaaaggggaaaaaaaccaatggccttggaaagggggggccttggcttggaccaaaaacaattcaacccccaccaagaattggtggccttcttaagaaaaggcttgggtttcttacttattaaaggcggtccaagaacaatggcccaccacttcttaagaaggggnggaccattaattccatttttttttttgaagccaagnggtttttcntccaaaattaattggc

SEQ ID NO: 1003 - DNA, 298 bp, homo sapiens
  misc_feature (1)...(298): n = A,T,C or G
gtttggccgctgacgagcaccagcaggatatgaggaggaaggagangtggaggtcagtgnggtcattctcaccaatttctttttgganttantttcaagntcantgnaanttgnatntcaaggcaaaaatganttcattggttcattaactggaaaanctggatctgatctttggaagaaggatttggaacataantgactgtacctttaatgaaaagattaacaatgcttcagagctgaattgccctggatttgtttagaatangccttgcgttttgcttttttgaggaggacttac

SEQ ID NO: 1004 - DNA, 335 bp, homo sapiens
ggttccaacaatctttgtacaagctggagttgtctcctccacatactccgcacttgtcatactgcagctttgagccaatggtgccgtcacagccagttctcacacacttcccccggacgcagacggaattactgtacggcctacattcagtgccatcggtcacctgaatcatggcaaatgcattaggagtgggaaatgtttgcatcagtatttgctcctttggtcaactaagaacctccttccataaactctccaaagcctccttcttggcatcctcttgtgatgtagcagagcaaggaaccccagacacggaaagttgcttaccaaaaaaaaaa

SEQ ID NO: 1005 - DNA, 182 bp, homo sapiens
ctgccacgccttccacctgcccctgcagtctggcggctcttctcctggactctccgcctggatccccgagccttttcttcttgctctggagtacgcggctcttgcgccccctcgcggcgtgattttcccaacgcacggagtcctggacggataaagcagcacccatcccccaaaaaaaaaaa

SEQ ID NO: 1006 - DNA, 104 bp, homo sapiens
atgcaacttccttgggtgaaatgtcacagcaatatggaaggtgcttcactgaagttattcacacttcttaatgattaaacttttaaggaactgaaaaaaaaaaa

SEQ ID NO: 1007 - DNA, 402 bp, homo sapiens
  misc_feature (1)...(402): n = A,T,C or G
ggggacccctgcttaatcanaactgatgggcttcaacaagcgtgcacctnnggcactcaaagaaattccctaaatttgccatnaatgaaatgggaacttttnatgtgcgcattgactgccaggctcaacaaagcnntttgngcccaaatgagataacagaatngtgcacntaccnaatncgtggtgccggattgtgccanananacgnaggtgaggatgaangaatgnaccaaanaaagctntatacttttctttnnaccnattttaccanaaatgnaacantttttnnnaaaaatngttccaagaacaggcntcgantggntgngaangaacaaacgtaannccgctttntnccgttctatgaattgcaaaaatatgaggttncttagaattttggccctt

SEQ ID NO: 1008 - DNA, 104 bp, homo sapiens
atgcaacttccttgggtgaagtgtcacagcaatatggaagatgcttcactgaagttattcacacttcttaatgattaaacttttaaggaactgaaaaaaaaaaa

What is claimed is:

1. An isolated or purified polynucleotide comprising the sense or antisense sequence of any one of SEQ ID NOS:9-1,008 or a fragment of at least 8 contiguous nucleotides first disclosed in any one of SEQ ID NOS:9-1,008.

2. An isolated or purified gene or cDNA that hybridizes under stringent conditions to the sense or antisense sequence of any of SEQ ID NOS:9-1,008 or a fragment at least 8 contiguous nucleotides first disclosed in any one of SEQ ID NOS:9-1,008.

3. The isolated or purified polynucleotide of claim 2, wherein the fragment is at least 60 nucleotides.

4. A recombinant expression vector comprising the polynucleotide of claim 3.

5. A host cell comprising the vector of claim 4.

6. An in vitro process for producing a polynucleotide comprising the steps of:
a) obtaining a polynucleotide template encoding a sequence capable of hybridizing to a GTS of any one of SEQ ID NOS:9-1,008;
b) combining said template with a synthetic oligonucleotide sequence of about 14 to about 80 bases in length that comprises a contiguous sequence of at least about 12 nucleotides first disclosed in any one of SEQ ID NOS:9-1,008; and
c) processing the combined oligonucleotide and template preparation such that said oligonucleotide sequence hybridizes to said template in the presence of a DNA polymerase molecule and a sufficient concentration of dNTPs for said oligonucleotide sequence to prime DNA synthesis by said polymerase,
wherein a polynucleotide is produced that encodes at least about 50 contiguous nucleotides in any one of SEQ ID NOS:9-1,008.

7. The process of claim 6 wherein said template is mammalian cDNA.

8. A process according to claim 7 wherein said template is of human origin.

9. The process of claim 6 wherein said template is mammalian genomic DNA.

10. A process according to claim 9 wherein said template is of human origin.

11. A computer readable medium having recorded thereon the sense or antisense sequence of any one of SEQ ID NOS:9-1,008 or a fragment at least 8 contiguous nucleotides first disclosed therein or a nucleotide sequence at least 99% identical thereto.

12. The computer readable medium of claim 11, wherein said medium is selected from the group consisting of a floppy disc, a hard disc, random access memory (RAM), read only memory (ROM), and CD-ROM.

13. A computer-based system for identifying nucleic acid fragments of the human genome of commercial importance comprising the following elements:
a) a data storage means comprising the sense or antisense sequence of any one of SEQ ID NOS:9-1,008 or a fragment at least 8 contiguous nucleotides first disclosed therein or a nucleotide sequence at least 99% identical thereto;
b) search means for comparing a target sequence to the nucleotide sequence of the data storage means of step a) to identify homologous sequence(s); and
c) retrieval means for obtaining said homologous sequence(s) of step (b).
